(19) United States
(12) Patent Application Publication
(10) Pub. No.: US 2010/0083395 A1
(43) Pub. Date: Apr. 1, 2010

(54) STRESS-RELATED POLYNUCLEOTIDES AND POLYPEPTIDES IN PLANTS

(75) Inventors: T. Lynne Reuber, San Mateo, CA (US); Jose Luis Riechmann, Barcelona (ES); Jacqueline E. Heard, Webster Groves, MO (US); Cai-Zhong Jiang, Fremont, CA (US); Luc Adam, Hayward, CA (US); Oliver Ratcliffe, Oakland, CA (US); Omaira Pineda, Vero Beach, FL (US); Guo-Liang Yu, Berkeley, CA (US); Neal I. Gutterson, Oakland, CA (US); Frederick D. Hempel, Hayward, CA (US); Roderick W. Kumimoto, Norman, OK (US); James S. Keddie, San Mateo, CA (US)

Correspondence Address: Mendel Biotechnology, Inc., 3935 Point Eden Way, Hayward, CA, 94545, US

(73) Assignee: Mendel Biotechnology, Inc., Hayward, CA (US)

(21) Appl. No.: 12/577,662

(22) Filed: Oct. 12, 2009

Related U.S. Application Data
(63) Continuation of application No. 11/725,235, filed on Mar. 16, 2007, now Pat. No. 7,601,893.
Application No. 11/725,235 is a division of application No. 10/225,068, filed on Aug. 9, 2002, now Pat. No. 7,193,129.
Application No. 10/225,068 is a continuation-in-part of application No. 09/837,944, filed on Apr. 18, 2001, now abandoned.
Application No. 09/837,944 is a continuation-in-part of application No. 10/171,468, filed on Jun. 14, 2002, now abandoned.
Application No. 10/171,468 is a continuation-in-part of application No. 11/986,992, filed on Nov. 26, 2007.
Application No. 11/986,992 is a division of application No. 10/412,699, filed on Apr. 10, 2003, now Pat. No. 7,345,217.
Application No. 10/412,699 is a continuation-in-part of application No. 11/435,388, filed on May 15, 2006, now Pat. No. 7,663,025.
Application No. 11/435,388 is a continuation-in-part of application No. PCT/US04/37584, filed on Nov. 12, 2004.
Application No. PCT/US04/37584 is a continuation-in-part of application No. 10/714,887, filed on Nov. 13, 2003.
Application No. 10/714,887 is a continuation-in-part of application No. 12/338,024, filed on Dec. 18, 2008.
Application No. 12/338,024 is a division of application No. 10/374,780, filed on Feb. 25, 2003, now Pat. No. 7,511,190.
Application No. 10/374,780 is a continuation-in-part of application No. 09/713,994, filed on Nov. 16, 2000, now abandoned.
Application No. 12/338,024 is a continuation-in-part of application No. 09/934,455, filed on Aug. 22, 2001, now abandoned.
Application No. 09/934,455 is a continuation-in-part of application No. 09/713,994, filed on Nov. 16, 2000, now abandoned.
Application No. 09/713,994 is a continuation-in-part of application No. 09/837,944, filed on Apr. 18, 2001, now abandoned.
Application No. 12/338,024 is a continuation-in-part of application No. 10/225,068, filed on Aug. 9, 2002, now Pat. No. 7,193,129.
Application No. 10/225,068 is a continuation-in-part of application No. 09/837,944, filed on Apr. 18, 2001, now abandoned.
Application No. 09/837,944 is a continuation-in-part of application No. 10/171,468, filed on Jun. 14, 2002, now abandoned.
Application No. 10/171,468 is a continuation-in-part of application No. 12/077,535, filed on Mar. 17, 2008.
Application No. 12/077,535 is a continuation-in-part of application No. 12/077,535, filed on Mar. 17, 2008.
Application No. 12/077,535 is a continuation-in-part of application No. 12/064,961, filed on Dec. 22, 2008.
Application No. 12/077,535 is a continuation-in-part of application No. 10/225,068, filed on Aug. 9, 2002, now Pat. No. 7,193,129.
Application No. 10/225,068 is a continuation-in-part of application No. 09/837,944, filed on Apr. 18, 2001, now abandoned.
Application No. 09/837,944 is a continuation-in-part of application No. 10/171,468, filed on Jun. 14, 2002, now abandoned.
Application No. 10/171,468 is a continuation-in-part of application No. 10/870,198, filed on Jun. 16, 2004.
Application No. 10/870,198 is a continuation-in-part of application No. 10/669,824, filed on Sep. 23, 2003.
Application No. 10/669,824 is a continuation-in-part of application No. 10/225,068, filed on Aug. 9, 2002, now Pat. No. 7,193,129.
Application No. 10/225,068 is a continuation-in-part of application No. 10/714,887, filed on Nov. 13, 2003.
Application No. 10/714,887 is a continuation-in-part of application No. 10/225,068, filed on Aug. 9, 2002, now Pat. No. 7,193,129.
Application No. 10/225,068 is a continuation-in-part of application No. 10/669,824, filed on Sep. 23, 2003.
Application No. 10/669,824 is a continuation-in-part of application No. 10/374,780, filed on Feb. 25, 2003, now Pat. No. 7,511,190.
Application No. 10/870,198 is a continuation-in-part of application No. 10/374,780, filed on Feb. 25, 2003, now Pat. No. 7,511,190.
Application No. 10/374,780 is a continuation-in-part of application No. 10/412,699, filed on Apr. 10, 2003, now Pat. No. 7,345,217.
(60) Provisional application No. 60/310,847, filed on Aug. 9, 2001.
(60) Provisional application No. 60/336,049, filed on Nov. 19, 2001.
(60) Provisional application No. 60/338,692, filed on Dec. 11, 2001.
(60) Provisional application No. 60/542,928, filed on Feb. 5, 2004.
(60) Provisional application No. 60/527,658, filed on Dec. 5, 2003.
(60) Provisional application No. 60/166,228, filed on Nov. 17, 1999.
(60) Provisional application No. 60/197,899, filed on Apr. 17, 2000.
(60) Provisional application No. 60/227,439, filed on Aug. 22, 2000.
(60) Provisional application No. 60/227,439, filed on Aug. 22, 2000.
(60) Provisional application No. 60/310,847, filed on Aug. 9, 2001.
(60) Provisional application No. 60/336,049, filed on Nov. 19, 2001.
(60) Provisional application No. 60/338,692, filed on Dec. 11, 2001.
(60) Provisional application No. 60/961,403, filed on Jul. 20, 2007.
(60) Provisional application No. 60/961,403, filed on Jul. 20, 2007.
(60) Provisional application No. 60/713,952, filed on Aug. 31, 2005.
(60) Provisional application No. 60/336,049, filed on Nov. 19, 2001.
(60) Provisional application No. 60/338,692, filed on Dec. 11, 2001.
(60) Provisional application No. 60/527,658, filed on Dec. 5, 2003.
(60) Provisional application No. 60/542,928, filed on Feb. 5, 2004.

(51) Int. Cl. A01H 5/00; C12N 5/10; C12N 15/82; A01H 1/02

(52) U.S. Cl. 800/260; 800/298; 435/419; 800/306; 800/312; 800/320.3; 800/320.1; 800/317.2; 800/314; 800/320.2; 800/322; 800/309; 800/307; 800/317; 800/317.1; 800/310; 800/317.3; 800/308; 800/290

(57) ABSTRACT

The invention relates to plant transcription factor polypeptides, polynucleotides that encode them, homologs from a variety of plant species, and methods of using the polynucleotides and polypeptides to produce transgenic plants having advantageous properties compared to a reference plant. Sequence information related to these polynucleotides and polypeptides can also be used in bioinformatic search methods and is also disclosed.

[0001] This application is a continuation-in-part of prior U.S. patent application Ser. No. 11/725,235, filed Mar. 16, 2007 (pending), which is a divisional application of prior U.S. patent application Ser. No. 10/225,068, filed Aug. 9, 2002 (issued as U.S. Pat. No. 7,193,129). U.S. patent application Ser. No. 10/225,068 claims the benefit of U.S. provisional applications 60/310,847, filed Aug. 9, 2001 (expired), 60/336,049, filed Nov. 19, 2001 (expired), and 60/338,692, filed Dec. 11, 2001 (expired). U.S. patent application Ser. No. 10/225,068 is also a continuation-in-part of prior U.S. patent application Ser. No. 09/837,944, filed Apr. 18, 2001 (abandoned), and U.S. patent application Ser. No. 10/225,068 is a continuation-in-part of prior U.S. patent application Ser. No. 10/171,468, filed Jun. 14, 2002 (abandoned). This application is a continuation-in-part of prior U.S. patent application Ser. No. 11/986,992, filed Nov. 26, 2007 (pending), which is a divisional application of prior U.S. patent application Ser. No. 10/412,699 (issued as U.S. Pat. No. 7,345,217), filed Apr. 10, 2003. This application is a continuation-in-part of prior U.S. patent application Ser. No. 11/435,388, filed May 15, 2006 (pending), which is a continuation-in-part of PCT application PCT/US04/37584, filed Nov. 12, 2004 (published). PCT/US04/37584 is a continuation-in-part of prior U.S. patent application Ser. No. 10/714,887, filed Nov. 13, 2003 (pending). PCT/US04/37584 also claims the benefit of prior U.S. provisional applications 60/527,658, filed Dec. 5, 2003 (expired), and 60/542,928, filed Feb. 5, 2004 (expired). This application is a continuation-in-part of prior U.S. patent application Ser. No. 12/338,024, filed Dec. 18, 2008 (pending), which is a division of prior U.S. patent application Ser. No. 10/374,780, filed Feb. 25, 2003 (issued as U.S. Pat. No. 7,511,190). U.S. patent application Ser. No. 10/374,780 is a continuation-in-part of prior U.S. patent application Ser. No. 10/225,068, filed Aug. 9, 2002 (issued as U.S. Pat. No. 7,193,129). U.S. patent application Ser. No. 10/225,068 claims the benefit of U.S. provisional applications 60/310,847, filed Aug. 9, 2001 (expired), 60/336,049, filed Nov. 19, 2001 (expired), and 60/338,692, filed Dec. 11, 2001 (expired). U.S. patent application Ser. No. 10/225,068 is also a continuation-in-part of prior U.S. patent application Ser. No. 09/837,944, filed Apr. 18, 2001 (abandoned), and U.S. patent application Ser. No. 10/225,068 is a continuation-in-part of prior U.S. patent application Ser. No. 10/171,468, filed Jun. 14, 2002 (abandoned). This application is a continuation-in-part of prior U.S. patent application Ser. No. 12/077,535, filed Mar. 17, 2008 (pending). U.S. patent application Ser. No. 12/077,535 claims the benefit of U.S. provisional applications 60/961,403, filed Jul. 20, 2007 (expired), 60/527,658, filed Dec. 5, 2003 (expired), and 60/542,928, filed Feb. 5, 2004 (expired). U.S. patent application Ser. No. 12/077,535 is also a continuation in part of prior U.S. patent application Ser. No. 12/064,961, filed Dec. 22, 2008 (pending). U.S. patent application Ser. No. 12/064,961 is a national stage application of PCT application PCT/US06/34615, filed Aug. 31, 2006 (published). PCT application PCT/US06/34615 is a continuation of U.S. provisional application 60/713,952, filed Aug. 31, 2005 (expired). U.S. patent application Ser. No. 12/077,535 is also a continuation-in-part of prior U.S. patent application Ser. No. 10/225,068, filed Aug. 9, 2002 (issued as U.S. Pat. No. 7,193,129). U.S. patent application Ser. No. 10/225,068 claims the benefit of U.S. provisional applications 60/310,847, filed Aug. 9, 2001 (expired), 60/336,049, filed Nov. 19, 2001 (expired), and 60/338,692, filed Dec. 11, 2001 (expired). U.S. patent application Ser. No. 10/225,068 is also a continuation-in-part of prior U.S. patent application Ser. No. 09/837,944, filed Apr. 18, 2001 (abandoned), and U.S. patent application Ser. No. 10/225,068 is a continuation-in-part of prior U.S. patent application Ser. No. 10/171,468, filed Jun. 14, 2002 (abandoned). This application is a continuation-in-part of prior U.S. patent application Ser. No. 10/870,198, filed Jun. 16, 2004 (pending). U.S. patent application Ser. No. 10/870,198 claims the benefit of U.S. provisional applications 60/527,658, filed Dec. 5, 2003 (expired), and 60/542,928 filed Feb. 5, 2004 (expired). U.S. patent application Ser. No. 10/870,198 is a continuation-in-part of prior U.S. patent application Ser. No. 10/669,824, filed Sep. 23, 2003 (pending). U.S. patent application Ser. No. 10/870,198 is also a continuation-in-part of prior U.S. patent application Ser. No. 10/225,068, filed Aug. 9, 2002 (issued as U.S. Pat. No. 7,193,129). U.S. patent application Ser. No. 10/870,198 is a continuation-in-part of prior U.S. patent application Ser. No. 10/714,887, filed Nov. 13, 2003 (pending). This application is a continuation-in-part of prior U.S. patent application Ser. No. 10/714,887, filed Nov. 13, 2003 (pending). U.S. patent application Ser. No. 10/714,887 is a continuation-in-part of prior U.S. patent application Ser. No. 10/225,068, filed Aug. 9, 2002 (issued as U.S. Pat. No. 7,193,129). U.S. patent application Ser. No. 10/714,887 is a continuation-in-part of prior U.S. patent application Ser. No. 10/669,824, filed Sep. 23, 2003 (pending). U.S. patent application Ser. No. 10/714,887 is a continuation-in-part of prior U.S. patent application Ser. No. 10/374,780, filed Feb. 25, 2003 (issued as U.S. Pat. No. 7,511,190). U.S. patent application Ser. No. 10/714,887 is a continuation-in-part of prior U.S. patent application Ser. No. 10/412,699, filed Apr. 10, 2003 (issued as U.S. Pat. No. 7,345,217). Each of these patent applications is herein incorporated by reference.

### FIELD OF THE INVENTION

[0002] This invention relates to the field of plant biology. More particularly, the present invention pertains to compositions and methods for phenotypically modifying a plant.

### INTRODUCTION

[0003] A plant's traits, such as its biochemical, developmental, or phenotypic characteristics, may be controlled through a number of cellular processes. One important way to manipulate that control is through transcription factors—proteins that influence the expression of a particular gene or sets of genes. Transformed and transgenic plants that comprise cells having altered levels of at least one selected transcription factor, for example, possess advantageous or desirable traits. Strategies for manipulating traits by altering a plant cell's transcription factor content can therefore result in plants and crops with commercially valuable properties. Applicants have identified polynucleotides encoding transcription factors, developed numerous transgenic plants using these polynucleotides, and have analyzed the plants for a variety of important traits. In so doing, applicants have identified important polynucleotide and polypeptide sequences for producing commercially valuable plants and crops as well as the methods for making them and using them. Other aspects and embodiments of the invention are described below and can be derived from the teachings of this disclosure as a whole.

### BACKGROUND OF THE INVENTION

[0004] Transcription factors can modulate gene expression, either increasing or decreasing (inducing or repressing) the rate of transcription. This modulation results in differential levels of gene expression at various developmental stages, in different tissues and cell types, and in response to different exogenous (e.g., environmental) and endogenous stimuli throughout the life cycle of the organism.

[0005] Because transcription factors are key controlling elements of biological pathways, altering the expression levels of one or more transcription factors can change entire biological pathways in an organism. For example, manipulation of the levels of selected transcription factors may result in increased expression of economically useful proteins or metabolic chemicals in plants or to improve other agriculturally relevant characteristics. Conversely, blocked or reduced expression of a transcription factor may reduce biosynthesis of unwanted compounds or remove an undesirable trait. Therefore, manipulating transcription factor levels in a plant offers tremendous potential in agricultural biotechnology for modifying a plant's traits.

[0006] The present invention provides novel transcription factors useful for modifying a plant's phenotype in desirable ways.

### SUMMARY OF THE INVENTION

[0007] In a first aspect, the invention relates to a recombinant polynucleotide comprising a nucleotide sequence selected from the group consisting of: (a) a nucleotide sequence encoding a polypeptide comprising a polypeptide sequence selected from those of the Sequence Listing, SEQ ID NOs: 2 to 2N, where N=2-123, or those listed in Table 4, or a complementary nucleotide sequence thereof; (b) a nucleotide sequence encoding a polypeptide comprising a variant of a polypeptide of (a) having one or more, or between 1 and about 5, or between 1 and about 10, or between 1 and about 30, conservative amino acid substitutions; (c) a nucleotide sequence comprising a sequence selected from those of SEQ ID NOs: 1 to (2N−1), where N=2-123, or those included in Table 4, or a complementary nucleotide sequence thereof; (d) a nucleotide sequence comprising silent substitutions in a nucleotide sequence of (c); (e) a nucleotide sequence which hybridizes under stringent conditions over substantially the entire length of a nucleotide sequence of one or more of: (a), (b), (c), or (d); (f) a nucleotide sequence comprising at least 10 or 15, or at least about 20, or at least about 30 consecutive nucleotides of a sequence of any of (a)-(e), or at least 10 or 15, or at least about 20, or at least about 30 consecutive nucleotides outside of a region encoding a conserved domain of any of (a)-(e); (g) a nucleotide sequence comprising a subsequence or fragment of any of (a)-(f), which subsequence or fragment encodes a polypeptide having a biological activity that modifies a plant's characteristic, functions as a transcription factor, or alters the level of transcription of a gene or transgene in a cell; (h) a nucleotide sequence having at least 31% sequence identity to a nucleotide sequence of any of (a)-(g); (i) a nucleotide sequence having at least 60%, or at least 70%, or at least 80%, or at least 90%, or at least 95% sequence identity to a nucleotide sequence of any of (a)-(g) or a 10 or 15 nucleotide, or at least about 20, or at least about 30 nucleotide region of a sequence of (a)-(g) that is outside of a region encoding a conserved domain; (j) a nucleotide sequence that encodes a polypeptide having at least 31% sequence identity to a polypeptide listed in Table 4, or the Sequence Listing; (k) a nucleotide sequence which encodes a polypeptide having at least 60%, or at least 70%, or at least 80%, or at least 90%, or at least 95% sequence identity to a polypeptide listed in Table 4, or the Sequence Listing; and (l) a nucleotide sequence that encodes a conserved domain of a polypeptide having at least 85%, or at least 90%, or at least 95%, or at least 98% sequence identity to a conserved domain of a polypeptide listed in Table 4, or the Sequence Listing. The recombinant polynucleotide may further comprise a constitutive, inducible, or tissue-specific promoter operably linked to the nucleotide sequence. The invention also relates to compositions comprising at least two of the above-described polynucleotides.

[0008] In a second aspect, the invention comprises an isolated or recombinant polypeptide comprising a subsequence of at least about 10, or at least about 15, or at least about 20, or at least about 30 contiguous amino acids encoded by the recombinant or isolated polynucleotide described above, or comprising a subsequence of at least about 8, or at least about 12, or at least about 15, or at least about 20, or at least about 30 contiguous amino acids outside a conserved domain.

[0009] In a third aspect, the invention comprises an isolated or recombinant polynucleotide that encodes a polypeptide that is a paralog of the isolated polypeptide described above. In one aspect, the invention is a paralog which, when expressed in Arabidopsis, modifies a trait of the Arabidopsis plant.

[0010] In a fourth aspect, the invention comprises an isolated or recombinant polynucleotide that encodes a polypeptide that is an ortholog of the isolated polypeptide described above. In one aspect, the invention is an ortholog which, when expressed in Arabidopsis, modifies a trait of the Arabidopsis plant.

[0011] In a fifth aspect, the invention comprises an isolated polypeptide that is a paralog of the isolated polypeptide described above. In one aspect, the invention is a paralog which, when expressed in Arabidopsis, modifies a trait of the Arabidopsis plant.

[0012] In a sixth aspect, the invention comprises an isolated polypeptide that is an ortholog of the isolated polypeptide described above. In one aspect, the invention is an ortholog which, when expressed in Arabidopsis, modifies a trait of the Arabidopsis plant.

[0013] The present invention also encompasses transcription factor variants. At the polypeptide level, the sequences described herein in the Sequence Listing and Tables 4 and 5, and the sequences of the invention by virtue of a paralogous or homologous relationship with the sequences described in the Sequence Listing or in Table 4 or Table 5, will typically share at least 50%, at least 51%, at least 52%, at least 53%, at least 54%, at least 55%, at least 56%, at least 57%, at least 58%, at least 59%, at least 60%, at least 61%, at least 62%, at least 63%, at least 64%, at least 65%, at least 66%, at least 67%, at least 68%, at least 69%, at least 70%, at least 71%, at least 72%, at least 73%, at least 74%, at least 75%, at least 76%, at least 77%, at least 78%, at least 79%, at least 80%, at least 81%, at least 82%, at least 83%, at least 84%, at least 85%, at least 86%, at least 87%, at least 88%, at least 89%, at least 90%, at least 91%, at least 92%, at least 93%, at least 94%, at least 95%, at least 96%, at least 97%, at least 98%, at least 99%, or about 100% amino acid sequence identity to one or more of the listed full-length sequences, or to a conserved domain of a sequence provided in the Sequence Listing or in Table 4 (and identified by its amino acid coordinates in Table 4), to a listed sequence but excluding or outside of the known consensus sequence or consensus DNA-binding site. A preferred transcription factor variant is one having at least 50% amino acid sequence identity to the transcription factor amino acid sequences SEQ ID NOs: 2 to 2N, where N=2-123, and which contains at least one functional or structural characteristic of the transcription factor amino acid sequences. Sequences having lesser degrees of identity but comparable biological activity are considered to be equivalents.

[0014] In another aspect, the invention is a transgenic plant comprising one or more of the above-described isolated or recombinant polynucleotides. In yet another aspect, the invention is a plant with altered expression levels of a polynucleotide described above or a plant with altered expression or activity levels of an above-described polypeptide. Further, the invention is a plant lacking a nucleotide sequence encoding a polypeptide described above or substantially lacking a polypeptide described above. The plant may be any plant, including, but not limited to, Arabidopsis, mustard, soybean, wheat, corn, potato, cotton, rice, oilseed rape, sunflower, alfalfa, sugarcane, turf, banana, blackberry, blueberry, strawberry, raspberry, cantaloupe, carrot, cauliflower, coffee, cucumber, eggplant, grapes, honeydew, lettuce, mango, melon, onion, papaya, peas, peppers, pineapple, pumpkin, spinach, squash, sweet corn, tobacco, tomato, watermelon, rosaceous fruits, vegetable brassicas, and mint or other labiates. In yet another aspect, the inventions is an isolated plant material of a plant, including, but not limited to, plant tissue, fruit, seed, plant cell, embryo, protoplast, pollen, and the like. In yet another aspect, the invention is a transgenic plant tissue culture of regenerable cells, including, but not limited to, embryos, meristematic cells, microspores, protoplast, pollen, and the like.

[0015] In yet another aspect the invention is a transgenic plant comprising one or more of the above described polynucleotides wherein the encoded polypeptide is expressed and regulates transcription of a gene.

[0016] In a further aspect the invention provides a method of using the polynucleotide composition to breed a progeny plant from a transgenic plant including crossing plants, producing seeds from transgenic plants, and methods of breeding using transgenic plants, the method comprising transforming a plant with the polynucleotide composition to create a transgenic plant, crossing the transgenic plant with another plant, selecting seed, and growing the progeny plant from the seed.

[0017] In a further aspect, the invention provides a progeny plant derived from a parental plant wherein said progeny plant exhibits at least three fold greater messenger RNA levels than said parental plant, wherein the messenger RNA encodes a DNA-binding protein which is capable of binding to a DNA regulatory sequence and inducing expression of a plant trait gene, wherein the progeny plant is characterized by a change in the plant trait compared to said parental plant. In yet a further aspect, the progeny plant exhibits at least ten fold greater messenger RNA levels compared to said parental plant. In yet a further aspect, the progeny plant exhibits at least fifty fold greater messenger RNA levels compared to said parental plant.

[0018] In a further aspect, the invention relates to a cloning or expression vector comprising the isolated or recombinant polynucleotide described above or cells comprising the cloning or expression vector.

[0019] In yet a further aspect, the invention relates to a composition produced by incubating a polynucleotide of the invention with a nuclease, a restriction enzyme, a polymerase; a polymerase and a primer; a cloning vector, or with a cell.

[0020] Furthermore, the invention relates to a method for producing a plant having a modified trait. The method comprises altering the expression of an isolated or recombinant polynucleotide of the invention or altering the expression or activity of a polypeptide of the invention in a plant to produce a modified plant, and selecting the modified plant for a modified trait. In one aspect, the plant is a monocot plant. In another aspect, the plant is a dicot plant. In another aspect the recombinant polynucleotide is from a dicot plant and the plant is a monocot plant. In yet another aspect the recombinant polynucleotide is from a monocot plant and the plant is a dicot plant. In yet another aspect the recombinant polynucleotide is from a monocot plant and the plant is a monocot plant. In yet another aspect the recombinant polynucleotide is from a dicot plant and the plant is a dicot plant.

[0021] In another aspect, the invention is a transgenic plant comprising an isolated or recombinant polynucleotide encoding a polypeptide wherein the polypeptide is selected from the group consisting of SEQ ID NOs: 2-2N where N=2-123. In yet another aspect, the invention is a plant with altered expression levels of a polypeptide described above or a plant with altered expression or activity levels of an above-described polypeptide. Further, the invention is a plant lacking a polynucleotide sequence encoding a polypeptide described above or substantially lacking a polypeptide described above. The plant may be any plant, including, but not limited to, Arabidopsis, mustard, soybean, wheat, corn, potato, cotton, rice, oilseed rape, sunflower, alfalfa, sugarcane, turf, banana, blackberry, blueberry, strawberry, raspberry, cantaloupe, carrot, cauliflower, coffee, cucumber, eggplant, grapes, honeydew, lettuce, mango, melon, onion, papaya, peas, peppers, pineapple, pumpkin, spinach, squash, sweet corn, tobacco, tomato, watermelon, rosaceous fruits, vegetable brassicas, and mint or other labiates. In yet another aspect, the inventions is an isolated plant material of a plant, including, but not limited to, plant tissue, fruit, seed, plant cell, embryo, protoplast, pollen, and the like. In yet another aspect, the invention is a transgenic plant tissue culture of regenerable cells, including, but not limited to, embryos, meristematic cells, microspores, protoplast, pollen, and the like.

[0022] In another aspect, the invention relates to a method of identifying a factor that is modulated by or interacts with a polypeptide encoded by a polynucleotide of the invention. The method comprises expressing a polypeptide encoded by the polynucleotide in a plant; and identifying at least one factor that is modulated by or interacts with the polypeptide. In one embodiment the method for identifying modulating or interacting factors is by detecting binding by the polypeptide to a promoter sequence, or by detecting interactions between an additional protein and the polypeptide in a yeast two hybrid system, or by detecting expression of a factor by hybridization to a microarray, subtractive hybridization, or differential display.

[0023] In yet another aspect, the invention is a method of identifying a molecule that modulates activity or expression of a polynucleotide or polypeptide of interest. The method comprises placing the molecule in contact with a plant comprising the polynucleotide or polypeptide encoded by the polynucleotide of the invention and monitoring one or more of the expression level of the polynucleotide in the plant, the expression level of the polypeptide in the plant, and modulation of an activity of the polypeptide in the plant.

[0024] In yet another aspect, the invention relates to an integrated system, computer or computer readable medium comprising one or more character strings corresponding to a polynucleotide of the invention, or to a polypeptide encoded by the polynucleotide. The integrated system, computer or computer readable medium may comprise a link between one or more sequence strings to a modified plant trait.

[0025] In yet another aspect, the invention is a method for identifying a sequence similar or homologous to one or more polynucleotides of the invention, or one or more polypeptides encoded by the polynucleotides. The method comprises providing a sequence database, and querying the sequence database with one or more target sequences corresponding to the one or more polynucleotides or to the one or more polypeptides to identify one or more sequence members of the database that display sequence similarity or homology to one or more of the one or more target sequences.

[0026] The method may further comprise of linking the one or more of the polynucleotides of the invention, or encoded polypeptides, to a modified plant phenotype.

### BRIEF DESCRIPTION OF THE SEQUENCE LISTING, TABLES, AND FIGURE

[0027] The Sequence Listing provides exemplary polynucleotide and polypeptide sequences of the invention. The traits associated with the use of the sequences are included in the description provided below.

[0028] Incorporation of the Sequence Listing. The copy of the Sequence Listing, being submitted electronically with this patent application, provided under 37 CFR §1.821-1.825, is a read-only memory computer-readable file in ASCII text format. The Sequence Listing is named “SeqList_{—}0036-1CIP1.txt”, the electronic file of the Sequence Listing was created on Oct. 12, 2009, and is 652,806 bytes in size (638 kilobytes as measured in MS-WINDOWS). The Sequence Listing is herein incorporated by reference in its entirety.

[0029] Table 4 shows the polynucleotides and polypeptides identified by SEQ ID NO; Mendel Gene ID No.; conserved domain of the polypeptide; and if the polynucleotide was tested in a transgenic assay. The first column shows the polynucleotide SEQ ID NO; the second column shows the Mendel Gene ID No., GID; the third column shows the trait(s) resulting from the knock out or overexpression of the polynucleotide in the transgenic plant; the fourth column shows the category of the trait; the fifth column shows the transcription factor family to which the polynucleotide belongs; the sixth column (“Comment”), includes specific effects and utilities, relative to control plants; conferred by the polynucleotide of the first column; the seventh column shows the SEQ ID NO of the polypeptide encoded by the polynucleotide; and the eighth column shows the amino acid residue positions of the conserved domain in amino acid (AA) co-ordinates.

[0030] Table 5 lists a summary of orthologous and homologous sequences identified using BLAST (tblastx program). The first column shows the polynucleotide sequence identifier (SEQ ID NO), the second column shows the corresponding cDNA identifier (Gene ID), the third column shows the orthologous or homologous polynucleotide GenBank Accession Number (Test Sequence ID), the fourth column shows the calculated probability value that the sequence identity is due to chance (Smallest Sum Probability), the fifth column shows the plant species from which the test sequence was isolated (Test Sequence Species), and the sixth column shows the orthologous or homologous test sequence GenBank annotation (Test Sequence GenBank Annotation).

[0031] FIG. 1 shows a phylogenic tree of related plant families adapted from Daly et al. (2001 Plant Physiology 127:1328-1333).

[0032] FIG. 2 is a phylogenetic tree of the G1073 clade member sequences and include numerous sequences within the clade that have similar functions of conferring, for example, greater biomass and hyperosmotic stress tolerance. The clade is found within the box.

### DETAILED DESCRIPTION OF EXEMPLARY EMBODIMENTS

[0033] In an important aspect, the present invention relates to polynucleotides and polypeptides, e.g. for modifying phenotypes of plants. Throughout this disclosure, various information sources are referred to and/or are specifically incorporated. The information sources include scientific journal articles, patent documents, textbooks, and World Wide Web browser-inactive page addresses, for example. While the reference to these information sources clearly indicates that they can be used by one of skill in the art, applicants specifically incorporate each and every one of the information sources cited herein, in their entirety, whether or not a specific mention of “incorporation by reference” is noted. The contents and teachings of each and every one of the information sources can be relied on and used to make and use embodiments of the invention.

[0034] It must be noted that as used herein and in the appended claims, the singular forms “a,” “an,” and “the” include plural reference unless the context clearly dictates otherwise. Thus, for example, a reference to “a plant” includes a plurality of such plants, and a reference to “a stress” is a reference to one or more stresses and equivalents thereof known to those skilled in the art, and so forth.

[0035] The polynucleotide sequences of the invention encode polypeptides that are members of well-known transcription factor families, including plant transcription factor families, as disclosed in Table 4. Generally, the transcription factors encoded by the present sequences are involved in cell differentiation and proliferation and the regulation of growth. Accordingly, one skilled in the art would recognize that by expressing the present sequences in a plant, one may change the expression of autologous genes or induce the expression of introduced genes. By affecting the expression of similar autologous sequences in a plant that have the biological activity of the present sequences, or by introducing the present sequences into a plant, one may alter a plant's phenotype to one with improved traits. The sequences of the invention may also be used to transform a plant and introduce desirable traits not found in the wild-type cultivar or strain. Plants may then be selected for those that produce the most desirable degree of over- or underexpression of target genes of interest and coincident trait improvement.

[0036] The sequences of the present invention may be from any species, particularly plant species, in a naturally occurring form or from any source whether natural, synthetic, semi-synthetic or recombinant. The sequences of the invention may also include fragments of the present amino acid sequences. In this context, a “fragment” refers to a fragment of a polypeptide sequence which is at least 5 to about 15 amino acids in length, most preferably at least 14 amino acids, and which retain some biological activity of a transcription factor. Where “amino acid sequence” is recited to refer to an amino acid sequence of a naturally occurring protein molecule, “amino acid sequence” and like terms are not meant to limit the amino acid sequence to the complete native amino acid sequence associated with the recited protein molecule.

[0037] As one of ordinary skill in the art recognizes, transcription factors can be identified by the presence of a region or domain of structural similarity or identity to a specific consensus sequence or the presence of a specific consensus DNA-binding site or DNA-binding site motif (see, for example, Riechmann et al., (2000) Science 290: 2105-2110). The plant transcription factors may belong to one of the following transcription factor families: the AP2 (APETALA2) domain transcription factor family (Riechmann and Meyerowitz (1998) Biol. Chem. 379:633-646); the MYB transcription factor family (Martin and Paz-Ares, (1997) Trends Genet. 13:67-73); the MADS domain transcription factor family (Riechmann and Meyerowitz (1997) Biol. Chem. 378:1079-1101); the WRKY protein family (Ishiguro and Nakamura (1994) Mol. Gen. Genet. 244:563-571); the ankyrin-repeat protein family (Zhang et al. (1992) Plant Cell 4:1575-1588); the zinc finger protein (Z) family (Klug and Schwabe (1995) FASEB J. 9: 597-604); the homeobox (HB) protein family (Buerglin in Guidebook to the Homeobox Genes, Duboule (ed.) (1994) Oxford University Press); the CAAT-element binding proteins (Forsburg and Guarente (1989) Genes Dev. 3:1166-1178); the squamosa promoter binding proteins (SPB) (Klein et al. (1996) Mol. Gen. Genet. 1996 250:7-16); the NAM protein family (Souer et al. (1996) Cell 85:159-170); the IAA/AUX proteins (Rouse et al. (1998) Science 279:1371-1373); the HLH/MYC protein family (Littlewood et al. (1994) Prot. Profile 1:639-709); the DNA-binding protein (DBP) family (Tucker et al. (1994) EMBO J. 13:2994-3002); the bZIP family of transcription factors (Foster et al. (1994) FASEB J. 8:192-200); the Box P-binding protein (the BPF-1) family (da Costa e Silva et al. (1993) Plant J. 4:125-135); the high mobility group (HMG) family (Bustin and Reeves (1996) Prog. Nucl. Acids Res. Mol. Biol. 54:35-100); the scarecrow (SCR) family (Di Laurenzio et al. (1996) Cell 86:423-433); the GF14 family (Wu et al. (1997) Plant Physiol. 114:1421-1431); the polycomb (PCOMB) family (Kennison (1995) Annu. Rev. Genet. 29:289-303); the teosinte branched (TEO) family (Luo et al. (1996) Nature 383:794-799; the ABI3 family (Giraudat et al. (1992) Plant Cell 4:1251-1261); the triple helix (TH) family (Dehesh et al. (1990) Science 250:1397-1399); the EIL family (Chao et al. (1997) Cell 89:1133-44); the AT-HOOK family (Reeves and Nissen (1990) J. Biol. Chem. 265:8573-8582); the S1FA family (Zhou et al. (1995) Nucleic Acids Res. 23:1165-1169); the bZIPT2 family (Lu and Ferl (1995) Plant Physiol. 109:723); the YABBY family (Bowman et al. (1999) Development 126:2387-96); the PAZ family (Bohmert et al. (1998) EMBO J. 17:170-80); a family of miscellaneous (MISC) transcription factors including the DPBF family (Kim et al. (1997) Plant J. 11:1237-1251) and the SPF1 family (Ishiguro and Nakamura (1994) Mol. Gen. Genet. 244:563-571); the golden (GLD) family (Hall et al. (1998) Plant Cell 10:925-936), the TUBBY family (Boggin et al, (1999) Science 286:2119-2125), the heat shock family (Wu C (1995) Annu Rev Cell Dev Biol 11:441-469), the ENBP family (Christiansen et al (1996) Plant Mol Biol 32:809-821), the RING-zinc family (Jensen et al. (1998) FEBS letters 436:283-287), the PDBP family (Janik et al Virology. (1989) 168:320-329), the PCF family (Cubas P, et al. Plant J. (1999) 18:215-22), the SRS(SHI-related) family (Fridborg et al Plant Cell (1999) 11:1019-1032), the CPP (cysteine-rich polycomb-like) family (Cvitanich et al Proc. Natl. Acad. Sci. USA. (2000) 97:8163-8168), the ARF (auxin response factor) family (Ulmasov, et al. (1999) Proc. Natl. Acad. Sci. USA 96: 5844-5849), the SWI/SNF family (Collingwood et al J. Mol. End. 23:255-275), the ACBF family (Seguin et al (1997) Plant Mal Biol. 35:281-291), PCGL (CG-1 like) family (da Costa e Silva et al. (1994) Plant Mol. Biol. 25:921-924) the ARID family (Vazquez et al. (1999) Development. 126: 733-42), the Jumonji family, Balciunas et al (2000, Trends Biochem Sci. 25: 274-276), the bZIP-NIN family (Schauser et al (1999) Nature 402: 191-195), the E2F family Kaelin et al (1992) Cell 70: 351-364) and the GRF-like family (Knaap et al (2000) Plant Physiol. 122: 695-704). As indicated by any part of the list above and as known in the art, transcription factors have been sometimes categorized by class, family, and sub-family according to their structural content and consensus DNA-binding site motif, for example. Many of the classes and many of the families and sub-families are listed here. However, the inclusion of one sub-family and not another, or the inclusion of one family and not another, does not mean that the invention does not encompass polynucleotides or polypeptides of a certain family or sub-family. The list provided here is merely an example of the types of transcription factors and the knowledge available concerning the consensus sequences and consensus DNA-binding site motifs that help define them as known to those of skill in the art (each of the references noted above are specifically incorporated herein by reference). A transcription factor may include, but is not limited to, any polypeptide that can activate or repress transcription of a single gene or a number of genes. This polypeptide group includes, but is not limited to, DNA-binding proteins, DNA-binding protein binding proteins, protein kinases, protein phosphatases, GTP-binding proteins, and receptors, and the like.

[0038] In addition to methods for modifying a plant phenotype by employing one or more polynucleotides and polypeptides of the invention described herein, the polynucleotides and polypeptides of the invention have a variety of additional uses. These uses include their use in the recombinant production (i.e., expression) of proteins; as regulators of plant gene expression, as diagnostic probes for the presence of complementary or partially complementary nucleic acids (including for detection of natural coding nucleic acids); as substrates for further reactions, e.g., mutation reactions, PCR reactions, or the like; as substrates for cloning e.g., including digestion or ligation reactions; and for identifying exogenous or endogenous modulators of the transcription factors. A “polynucleotide” is a nucleic acid sequence comprising a plurality of polymerized nucleotides, e.g., at least about 15 consecutive polymerized nucleotides, optionally at least about 30 consecutive nucleotides, at least about 50 consecutive nucleotides. In many instances, a polynucleotide comprises a nucleotide sequence encoding a polypeptide (or protein) or a domain or fragment thereof. Additionally, the polynucleotide may comprise a promoter, an intron, an enhancer region, a polyadenylation site, a translation initiation site, 5′ or 3′ untranslated regions, a reporter gene, a selectable marker, or the like. The polynucleotide can be single stranded or double stranded DNA or RNA. The polynucleotide optionally comprises modified bases or a modified backbone. The polynucleotide can be, e.g., genomic DNA or RNA, a transcript (such as an mRNA), a cDNA, a PCR product, a cloned DNA, a synthetic DNA or RNA, or the like. The polynucleotide can comprise a sequence in either sense or antisense orientations.

### DEFINITIONS

[0039] A “recombinant polynucleotide” is a polynucleotide that is not in its native state, e.g., the polynucleotide comprises a nucleotide sequence not found in nature, or the polynucleotide is in a context other than that in which it is naturally found, e.g., separated from nucleotide sequences with which it typically is in proximity in nature, or adjacent (or contiguous with) nucleotide sequences with which it typically is not in proximity. For example, the sequence at issue can be cloned into a vector, or otherwise recombined with one or more additional nucleic acid.

[0040] An “isolated polynucleotide” is a polynucleotide whether naturally occurring or recombinant, that is present outside the cell in which it is typically found in nature, whether purified or not. Optionally, an isolated polynucleotide is subject to one or more enrichment or purification procedures, e.g., cell lysis, extraction, centrifugation, precipitation, or the like.

[0041] A “polypeptide” is an amino acid sequence comprising a plurality of consecutive polymerized amino acid residues e.g., at least about 15 consecutive polymerized amino acid residues, optionally at least about 30 consecutive polymerized amino acid residues, at least about 50 consecutive polymerized amino acid residues. In many instances, a polypeptide comprises a polymerized amino acid residue sequence that is a transcription factor or a domain or portion or fragment thereof. Additionally, the polypeptide may comprise a localization domain, 2) an activation domain, 3) a repression domain, 4) an oligomerization domain or 5) a DNA-binding domain, or the like. The polypeptide optionally comprises modified amino acid residues, naturally occurring amino acid residues not encoded by a codon, non-naturally occurring amino acid residues.

[0042] A “recombinant polypeptide” is a polypeptide produced by translation of a recombinant polynucleotide. A “synthetic polypeptide” is a polypeptide created by consecutive polymerization of isolated amino acid residues using methods well known in the art. An “isolated polypeptide,” whether a naturally occurring or a recombinant polypeptide, is more enriched in (or out of) a cell than the polypeptide in its natural state in a wild type cell, e.g., more than about 5% enriched, more than about 10% enriched, or more than about 20%, or more than about 50%, or more, enriched, i.e., alternatively denoted: 105%, 110%, 120%, 150% or more, enriched relative to wild type standardized at 100%. Such an enrichment is not the result of a natural response of a wild type plant. Alternatively, or additionally, the isolated polypeptide is separated from other cellular components with which it is typically associated, e.g., by any of the various protein purification methods herein.

[0043] “Identity” or “similarity” refers to sequence similarity between two polynucleotide sequences or between two polypeptide sequences, with identity being a more strict comparison. The phrases “percent identity” and “% identity” refer to the percentage of sequence similarity found in a comparison of two or more polynucleotide sequences or two or more polypeptide sequences. Identity or similarity can be determined by comparing a position in each sequence that may be aligned for purposes of comparison. When a position in the compared sequence is occupied by the same nucleotide base or amino acid, then the molecules are identical at that position. A degree of similarity or identity between polynucleotide sequences is a function of the number of identical or matching nucleotides at positions shared by the polynucleotide sequences. A degree of identity of polypeptide sequences is a function of the number of identical amino acids at positions shared by the polypeptide sequences. A degree of homology or similarity of polypeptide sequences is a function of the number of amino acids, i.e., structurally related, at positions shared by the polypeptide sequences.

[0044] “Alignment” refers to a number of nucleotide bases or amino acid residue sequences aligned by lengthwise comparison so that components in common (i.e., nucleotide bases or amino acid residues at corresponding positions) may be visually and readily identified. The fraction or percentage of components in common is related to the homology or identity between the sequences.

[0045] “Altered” nucleic acid sequences encoding polypeptide include those sequences with deletions, insertions, or substitutions of different nucleotides, resulting in a polynucleotide encoding a polypeptide with at least one functional characteristic of the polypeptide. Included within this definition are polymorphisms that may or may not be readily detectable using a particular oligonucleotide probe of the polynucleotide encoding polypeptide, and improper or unexpected hybridization to allelic variants, with a locus other than the normal chromosomal locus for the polynucleotide sequence encoding polypeptide. The encoded polypeptide protein may also be “altered”, and may contain deletions, insertions, or substitutions of amino acid residues that produce a silent change and result in a functionally equivalent polypeptide. Deliberate amino acid substitutions may be made on the basis of similarity in residue side chain chemistry, including, but not limited to, polarity, charge, solubility, hydrophobicity, hydrophilicity, and/or the amphipathic nature of the residues, as long as the biological activity of polypeptide is retained. For example, negatively charged amino acids may include aspartic acid and glutamic acid, positively charged amino acids may include lysine and arginine, and amino acids with uncharged polar head groups having similar hydrophilicity values may include leucine, isoleucine, and valine; glycine and alanine; asparagine and glutamine; serine and threonine; and phenylalanine and tyrosine. Alignments between different polypeptide sequences may be used to calculate “percentage sequence similarity”.

[0046] The term “plant” includes whole plants, shoot vegetative organs/structures (e.g., leaves, stems and tubers), roots, flowers and floral organs/structures (e.g., bracts, sepals, petals, stamens, carpels, anthers and ovules), seed (including embryo, endosperm, and seed coat) and fruit (the mature ovary), plant tissue (e.g., vascular tissue, ground tissue, and the like) and cells (e.g., guard cells, egg cells, and the like), and progeny of same. The class of plants that can be used in the method of the invention is generally as broad as the class of higher and lower plants amenable to transformation techniques, including angiosperms (monocotyledonous and dicotyledonous plants), gymnosperms, ferns, horsetails, psilophytes, lycophytes, bryophytes, and multicellular algae. (See for example, FIG. 1, adapted from Daly et al. 2001 Plant Physiology 127:1328-1333; and see also Tudge, C., The Variety of Life, Oxford University Press, New York, 2000, pp. 547-606.)

[0047] A “transgenic plant” refers to a plant that contains genetic material not found in a wild type plant of the same species, variety or cultivar. The genetic material may include a transgene, an insertional mutagenesis event (such as by transposon or T-DNA insertional mutagenesis), an activation tagging sequence, a mutated sequence, a homologous recombination event or a sequence modified by chimeraplasty. Typically, the foreign genetic material has been introduced into the plant by human manipulation, but any method can be used as one of skill in the art recognizes.

[0048] A transgenic plant may contain an expression vector or cassette. The expression cassette typically comprises a polypeptide-encoding sequence operably linked (i.e., under regulatory control of) to appropriate inducible or constitutive regulatory sequences that allow for the expression of polypeptide. The expression cassette can be introduced into a plant by transformation or by breeding after transformation of a parent plant. A plant refers to a whole plant as well as to a plant part, such as seed, fruit, leaf, or root, plant tissue, plant cells or any other plant material, e.g., a plant explant, as well as to progeny thereof, and to in vitro systems that mimic biochemical or cellular components or processes in a cell.

[0049] A “control plant” as used in the present invention refers to a plant cell, seed, plant component, plant tissue, plant organ or whole plant used to compare against transformed, transgenic or genetically modified plant for the purpose of identifying an enhanced phenotype in the transformed, transgenic or genetically modified plant. A control plant may in some cases be a transformed or transgenic plant line that comprises an empty nucleic acid construct or marker gene, but does not contain the recombinant polynucleotide of the present invention that is expressed in the transformed, transgenic or genetically modified plant being evaluated. In general, a control plant is a plant of the same line or variety as the transformed, transgenic or genetically modified plant being tested. A suitable control plant would include a genetically unaltered or non-transgenic plant of the parental line used to generate a transformed or transgenic plant herein.

[0050] “Wild type” or “wild-type”, as used herein, refers to a plant cell, seed, plant component, plant tissue, plant organ or whole plant that has not been genetically modified or treated in an experimental sense. Wild-type cells, seed, components, tissue, organs or whole plants may be used as controls to compare levels of expression and the extent and nature of trait modification with cells, tissue or plants of the same species in which a polypeptide's expression is altered, for example, in that it has been knocked out, overexpressed, or ectopically expressed.

[0051] “Ectopic expression or altered expression” in reference to a polynucleotide indicates that the pattern of expression in, e.g., a transgenic plant or plant tissue, is different from the expression pattern in a wild type plant or a reference plant of the same species. The pattern of expression may also be compared with a reference expression pattern in a wild type plant of the same species. For example, the polynucleotide or polypeptide is expressed in a cell or tissue type other than a cell or tissue type in which the sequence is expressed in the wild type plant, or by expression at a time other than at the time the sequence is expressed in the wild type plant, or by a response to different inducible agents, such as hormones or environmental signals, or at different expression levels (either higher or lower) compared with those found in a wild type plant. The term also refers to altered expression patterns that are produced by lowering the levels of expression to below the detection level or completely abolishing expression. The resulting expression pattern can be transient or stable, constitutive or inducible. In reference to a polypeptide, the term “ectopic expression or altered expression” further may relate to altered activity levels resulting from the interactions of the polypeptides with exogenous or endogenous modulators or from interactions with factors or as a result of the chemical modification of the polypeptides.

[0052] A “fragment” or “domain,” with respect to a polypeptide, refers to a subsequence of the polypeptide. In some cases, the fragment or domain, is a subsequence of the polypeptide which performs at least one biological function of the intact polypeptide in substantially the same manner, or to a similar extent, as does the intact polypeptide. For example, a polypeptide fragment can comprise a recognizable structural motif or functional domain such as a DNA-binding site or domain that binds to a DNA promoter region, an activation domain, or a domain for protein-protein interactions. Fragments can vary in size from as few as 6 amino acids to the full length of the intact polypeptide, but are preferably at least about 30 amino acids in length and more preferably at least about 60 amino acids in length. In reference to a polynucleotide sequence, “a fragment” refers to any subsequence of a polynucleotide, typically, of at least about 15 consecutive nucleotides, preferably at least about 30 nucleotides, more preferably at least about 50 nucleotides, of any of the sequences provided herein.

[0053] The invention also encompasses production of DNA sequences that encode transcription factors and transcription factor derivatives, or fragments thereof, entirely by synthetic chemistry. After production, the synthetic sequence may be inserted into any of the many available expression vectors and cell systems using reagents well known in the art. Moreover, synthetic chemistry may be used to introduce mutations into a sequence encoding transcription factors or any fragment thereof.

[0054] A “conserved domain”, with respect to a polypeptide, refers to a domain within a transcription factor family which exhibits a higher degree of sequence homology, such as at least 50%, at least 51%, at least 52%, at least 53%, at least 54%, at least 55%, at least 56%, at least 57%, at least 58%, at least 59%, at least 60%, at least 61%, at least 62%, at least 63%, at least 64%, at least 65%, at least 66%, at least 67%, at least 68%, at least 69%, at least 70%, at least 71%, at least 72%, at least 73%, at least 74%, at least 75%, at least 76%, at least 77%, at least 78%, at least 79%, at least 80%, at least 81%, at least 82%, at least 83%, at least 84%, at least 85%, at least 86%, at least 87%, at least 88%, at least 89%, at least 90%, at least 91%, at least 92%, at least 93%, at least 94%, at least 95%, at least 96%, at least 97%, at least 98%, at least 99%, or about 100% amino acid residue sequence identity of a polypeptide of consecutive amino acid residues. A fragment or domain can be referred to as outside a consensus sequence or outside a consensus DNA-binding site that is known to exist or that exists for a particular transcription factor class, family, or sub-family. In this case, the fragment or domain will not include the exact amino acids of a consensus sequence or consensus DNA-binding site of a transcription factor class, family or sub-family, or the exact amino acids of a particular transcription factor consensus sequence or consensus DNA-binding site. Furthermore, a particular fragment, region, or domain of a polypeptide, or a polynucleotide encoding a polypeptide, can be “outside a conserved domain” if all the amino acids of the fragment, region, or domain fall outside of a defined conserved domain(s) for a polypeptide or protein. The conserved domains for each of polypeptides of SEQ ID NOs:2-2N, where N=2-123, are listed in Table 4 as described in Example VII. Also, many of the polypeptides of Table 4 have conserved domains specifically indicated by start and stop sites. A comparison of the regions of the polypeptides in SEQ ID NOs:2-2N, where N=2-123, or of those in Table 4, allows one of skill in the art to identify conserved domain(s) for any of the polypeptides listed or referred to in this disclosure, including those in Table 4 or Table 5.

[0055] A “trait” refers to a physiological, morphological, biochemical, or physical characteristic of a plant or particular plant material or cell. In some instances, this characteristic is visible to the human eye, such as seed or plant size, or can be measured by biochemical techniques, such as detecting the protein, starch, or oil content of seed or leaves, or by observation of a metabolic or physiological process, e.g. by measuring uptake of carbon dioxide, or by the observation of the expression level of a gene or genes, e.g., by employing Northern analysis, RT-PCR, microarray gene expression assays, or reporter gene expression systems, or by agricultural observations such as stress tolerance, yield, or pathogen tolerance. Any technique can be used to measure the amount of, comparative level of, or difference in any selected chemical compound or macromolecule in the transgenic plants, however.

[0056] “Trait modification” refers to a detectable difference in a characteristic in a plant ectopically expressing a polynucleotide or polypeptide of the present invention relative to a plant not doing so, such as a wild type plant. In some cases, the trait modification can be evaluated quantitatively. For example, the trait modification can entail at least about a 2% increase or decrease in an observed trait (difference), at least a 5% difference, at least about a 10% difference, at least about a 20% difference, at least about a 30%, at least about a 50%, at least about a 70%, or at least about a 100%, or an even greater difference compared with a wild type plant. It is known that there can be a natural variation in the modified trait. Therefore, the trait modification observed entails a change of the normal distribution of the trait in the plants compared with the distribution observed in wild type plant.

[0057] Traits Which May Be Modified. Trait modifications of particular interest include those to seed (such as embryo or endosperm), fruit, root, flower, leaf, stem, shoot, seedling or the like, including: enhanced tolerance to environmental conditions including freezing, chilling, heat, drought, water saturation, radiation and ozone; improved tolerance to microbial, fungal or viral diseases; improved tolerance to pest infestations, including nematodes, mollicutes, parasitic higher plants or the like; decreased herbicide sensitivity; improved tolerance of heavy metals or enhanced ability to take up heavy metals; improved growth under poor photoconditions (e.g., low light and/or short day length), or changes in expression levels of genes of interest. Other phenotype that can be modified relate to the production of plant metabolites, such as variations in the production of taxol, tocopherol, tocotrienol, sterols, phytosterols, vitamins, wax monomers, anti-oxidants, amino acids, lignins, cellulose, tannins, prenyllipids (such as chlorophylls and carotenoids), glucosinolates, and terpenoids, enhanced or compositionally altered protein or oil production (especially in seeds), or modified sugar (insoluble or soluble) and/or starch composition. Physical plant characteristics that can be modified include cell development (such as the number of trichomes), fruit and seed size and number, yields of plant parts such as stems, leaves, inflorescences, and roots, the stability of the seeds during storage, characteristics of the seed pod (e.g., susceptibility to shattering), root hair length and quantity, internode distances, or the quality of seed coat. Plant growth characteristics that can be modified include growth rate, germination rate of seeds, vigor of plants and seedlings, leaf and flower senescence, male sterility, apomixis, flowering time, flower abscission, rate of nitrogen uptake, osmotic sensitivity to soluble sugar concentrations, biomass or transpiration characteristics, as well as plant architecture characteristics such as apical dominance, branching patterns, number of organs, organ identity, organ shape or size.

[0058] Transcription Factors Modify Expression Of Endogenous Genes. Expression of genes which encode transcription factors that modify expression of endogenous genes, polynucleotides, and proteins are well known in the art. In addition, transgenic plants comprising isolated polynucleotides encoding transcription factors may also modify expression of endogenous genes, polynucleotides, and proteins. Examples include Peng et al. (1997, Genes and Development 11:3194-3205) and Peng et al. (1999, Nature, 400:256-261). In addition, many others have demonstrated that an Arabidopsis transcription factor expressed in an exogenous plant species elicits the same or very similar phenotypic response. See, for example, Fu et al. (2001, Plant Cell 13:1791-1802); Nandi et al. (2000, Curr. Biol. 10:215-218); Coupland (1995, Nature 377:482-483); and Weigel and Nilsson (1995, Nature 377:482-500).

[0059] In another example, Mandel et al. (1992, Cell 71-133-143) and Suzuki et al. (2001, Plant J. 28:409-418) teach that a transcription factor expressed in another plant species elicits the same or very similar phenotypic response of the endogenous sequence, as often predicted in earlier studies of Arabidopsis transcription factors in Arabidopsis (see Mandel et al., 1992, supra; Suzuki et al., 2001, supra).

[0060] Other examples include Miller et al. (2001, Plant J. 28:169-179); Kim et al. (2001, Plant J. 25:247-259); Kyozuka and Shimamoto (2002, Plant Cell Physiol. 43:130-135); Boss and Thomas (2002, Nature, 416:847-850); He et al. (2000, Transgenic Res., 9:223-227); and Robson et al. (2001, Plant J. 28:619-631).

[0061] In yet another example, Gilmour et al. (1998, Plant J. 16:433-442) teach an Arabidopsis AP2 transcription factor, CBF1, which, when overexpressed in transgenic plants, increases plant freezing tolerance. Jaglo et al (2001, Plant Physiol. 127:910-017) further identified sequences in Brassica napus which encode CBF-like genes and that transcripts for these genes accumulated rapidly in response to low temperature. Transcripts encoding CBF-like proteins were also found to accumulate rapidly in response to low temperature in wheat, as well as in tomato. An alignment of the CBF proteins from Arabidopsis, B. napus, wheat, rye, and tomato revealed the presence of conserved amino acid sequences, PKK/RPAGRxKFxETRHP and DSAWR, that bracket the AP2/EREBP DNA binding domains of the proteins and distinguish them from other members of the AP2/EREBP protein family. (See Jaglo et al., supra.)

[0062] Polypeptides and Polynucleotides of the Invention. The present invention provides, among other things, transcription factors (TFs), and transcription factor homologue polypeptides, and isolated or recombinant polynucleotides encoding the polypeptides, or novel variant polypeptides or polynucleotides encoding novel variants of transcription factors derived from the specific sequences provided here. These polypeptides and polynucleotides may be employed to modify a plant's characteristic.

[0063] Exemplary polynucleotides encoding the polypeptides of the invention were identified in the Arabidopsis thaliana GenBank database using publicly available sequence analysis programs and parameters. Sequences initially identified were then further characterized to identify sequences comprising specified sequence strings corresponding to sequence motifs present in families of known transcription factors. In addition, further exemplary polynucleotides encoding the polypeptides of the invention were identified in the plant GenBank database using publicly available sequence analysis programs and parameters. Sequences initially identified were then further characterized to identify sequences comprising specified sequence strings corresponding to sequence motifs present in families of known transcription factors. Polynucleotide sequences meeting such criteria were confirmed as transcription factors.

[0064] Additional polynucleotides of the invention were identified by screening Arabidopsis thaliana and/or other plant cDNA libraries with probes corresponding to known transcription factors under low stringency hybridization conditions. Additional sequences, including full length coding sequences were subsequently recovered by the rapid amplification of cDNA ends (RACE) procedure, using a commercially available kit according to the manufacturer's instructions. Where necessary, multiple rounds of RACE are performed to isolate 5′ and 3′ ends. The full length cDNA was then recovered by a routine end-to-end polymerase chain reaction (PCR) using primers specific to the isolated 5′ and 3′ ends. Exemplary sequences are provided in the Sequence Listing.

[0065] The polynucleotides of the invention can be or were ectopically expressed in overexpressor or knockout plants and the changes in the characteristic(s) or trait(s) of the plants observed. Therefore, the polynucleotides and polypeptides can be employed to improve the characteristics of plants.

[0066] The polynucleotides of the invention can be or were ectopically expressed in overexpressor plant cells and the changes in the expression levels of a number of genes, polynucleotides, and/or proteins of the plant cells observed. Therefore, the polynucleotides and polypeptides can be employed to change expression levels of a genes, polynucleotides, and/or proteins of plants.

[0067] Producing Polypeptides. The polynucleotides of the invention include sequences that encode transcription factors and transcription factor homologue polypeptides and sequences complementary thereto, as well as unique fragments of coding sequence, or sequence complementary thereto. Such polynucleotides can be, e.g., DNA or RNA, e.g., mRNA, cRNA, synthetic RNA, genomic DNA, cDNA synthetic DNA, oligonucleotides, etc. The polynucleotides are either double-stranded or single-stranded, and include either, or both sense (i.e., coding) sequences and antisense (i.e., non-coding, complementary) sequences. The polynucleotides include the coding sequence of a transcription factor, or transcription factor homologue polypeptide, in isolation, in combination with additional coding sequences (e.g., a purification tag, a localization signal, as a fusion-protein, as a pre-protein, or the like), in combination with non-coding sequences (e.g., introns or inteins, regulatory elements such as promoters, enhancers, terminators, and the like), and/or in a vector or host environment in which the polynucleotide encoding a transcription factor or transcription factor homologue polypeptide is an endogenous or exogenous gene.

[0068] A variety of methods exist for producing the polynucleotides of the invention. Procedures for identifying and isolating DNA clones are well known to those of skill in the art, and are described in, e.g., Berger and Kimmel, Guide to Molecular Cloning Techniques, Methods in Enzymology volume 152 Academic Press, Inc., San Diego, Calif. (“Berger”); Sambrook et al., Molecular Cloning—A Laboratory Manual (2nd Ed.), Vol. 1-3, Cold Spring Harbor Laboratory, Cold Spring Harbor, N.Y., 1989 (“Sambrook”) and Current Protocols in Molecular Biology, F. M. Ausubel et al., eds., Current Protocols, a joint venture between Greene Publishing Associates, Inc. and John Wiley & Sons, Inc., (supplemented through 2000) (“Ausubel”).

[0069] Alternatively, polynucleotides of the invention, can be produced by a variety of in vitro amplification methods adapted to the present invention by appropriate selection of specific or degenerate primers. Examples of protocols sufficient to direct persons of skill through in vitro amplification methods, including the polymerase chain reaction (PCR) the ligase chain reaction (LCR), Qbeta-replicase amplification and other RNA polymerase mediated techniques (e.g., NASBA), e.g., for the production of the homologous nucleic acids of the invention are found in Berger (supra), Sambrook (supra), and Ausubel (supra), as well as Mullis et al., (1987) PCR Protocols A Guide to Methods and Applications (Innis et al. eds) Academic Press Inc. San Diego, Calif. (1990) (Innis). Improved methods for cloning in vitro amplified nucleic acids are described in Wallace et al., U.S. Pat. No. 5,426,039. Improved methods for amplifying large nucleic acids by PCR are summarized in Cheng et al. (1994) Nature 369: 684-685 and the references cited therein, in which PCR amplicons of up to 40 kb are generated. One of skill will appreciate that essentially any RNA can be converted into a double stranded DNA suitable for restriction digestion, PCR expansion and sequencing using reverse transcriptase and a polymerase. See, e.g., Ausubel, Sambrook and Berger, all supra.

[0070] Alternatively, polynucleotides and oligonucleotides of the invention can be assembled from fragments produced by solid-phase synthesis methods. Typically, fragments of up to approximately 100 bases are individually synthesized and then enzymatically or chemically ligated to produce a desired sequence, e.g., a polynucleotide encoding all or part of a transcription factor. For example, chemical synthesis using the phosphoramidite method is described, e.g., by Beaucage et al. (1981) Tetrahedron Letters 22:1859-1869; and Matthes et al. (1984) EMBO J. 3:801-805. According to such methods, oligonucleotides are synthesized, purified, annealed to their complementary strand, ligated and then optionally cloned into suitable vectors. And if so desired, the polynucleotides and polypeptides of the invention can be custom ordered from any of a number of commercial suppliers.

[0071] Homologous Sequences. Sequences homologous, i.e., that share significant sequence identity or similarity, to those provided in the Sequence Listing, derived from Arabidopsis thaliana or from other plants of choice are also an aspect of the invention. Homologous sequences can be derived from any plant including monocots and dicots and in particular agriculturally important plant species, including but not limited to, crops such as soybean, wheat, corn, potato, cotton, rice, rape, oilseed rape (including canola), sunflower, alfalfa, sugarcane and turf; or fruits and vegetables, such as banana, blackberry, blueberry, strawberry, and raspberry, cantaloupe, carrot, cauliflower, coffee, cucumber, eggplant, grapes, honeydew, lettuce, mango, melon, onion, papaya, peas, peppers, pineapple, pumpkin, spinach, squash, sweet corn, tobacco, tomato, watermelon, rosaceous fruits (such as apple, peach, pear, cherry and plum) and vegetable brassicas (such as broccoli, cabbage, cauliflower, Brussels sprouts, and kohlrabi). Other crops, fruits and vegetables whose phenotype can be changed include barley, rye, millet, sorghum, currant, avocado, citrus fruits such as oranges, lemons, grapefruit and tangerines, artichoke, cherries, nuts such as the walnut and peanut, endive, leek, roots, such as arrowroot, beet, cassaya, turnip, radish, yam, and sweet potato, and beans. The homologous sequences may also be derived from woody species, such pine, poplar and eucalyptus, or mint or other labiates.

### Orthologs and Paralogs.

[0072] Homologous sequences as described above can comprise orthologous or paralogous sequences. Several different methods are known by those of skill in the art for identifying and defining these functionally homologous sequences. General methods for identifying orthologs and paralogs, including phylogenetic methods, sequence similarity and hybridization methods, are described herein; an ortholog or paralog, including equivalogs, may be identified by one or more of the methods described below.

[0073] As described by Eisen (Eisen (1998) Genome Res. 8: 163-167), evolutionary information may be used to predict gene function. It is common for groups of genes that are homologous in sequence to have diverse, although usually related, functions. However, in many cases, the identification of homologs is not sufficient to make specific predictions because not all homologs have the same function. Thus, an initial analysis of functional relatedness based on sequence similarity alone may not provide one with a means to determine where similarity ends and functional relatedness begins. Fortunately, it is well known in the art that protein function can be classified using phylogenetic analysis of gene trees combined with the corresponding species. Functional predictions can be greatly improved by focusing on how the genes became similar in sequence (i.e., by evolutionary processes) rather than on the sequence similarity itself (Eisen, supra). In fact, many specific examples exist in which gene function has been shown to correlate well with gene phylogeny (Eisen, supra). Thus, “[t]he first step in making functional predictions is the generation of a phylogenetic tree representing the evolutionary history of the gene of interest and its homologs. Such trees are distinct from clusters and other means of characterizing sequence similarity because they are inferred by techniques that help convert patterns of similarity into evolutionary relationships . . . . After the gene tree is inferred, biologically determined functions of the various homologs are overlaid onto the tree. Finally, the structure of the tree and the relative phylogenetic positions of genes of different functions are used to trace the history of functional changes, which is then used to predict functions of [as yet] uncharacterized genes” (Eisen, supra).

[0074] Within a single plant species, gene duplication may cause two copies of a particular gene, giving rise to two or more genes with similar sequence and often similar function known as paralogs. A paralog is therefore a similar gene formed by duplication within the same species. Paralogs typically cluster together or in the same clade (a group of similar genes) when a gene family phylogeny is analyzed using programs such as CLUSTAL (Thompson et al. (1994) Nucleic Acids Res. 22: 4673-4680; Higgins et al. (1996) Methods Enzymol. 266: 383-402). Groups of similar genes can also be identified with pair-wise BLAST analysis (Feng and Doolittle (1987) J. Mol. Evol. 25: 351-360). For example, a clade of very similar MADS domain transcription factors from Arabidopsis all share a common function in flowering time (Ratcliffe et al. (2001) Plant Physiol. 126: 122-132), and a group of very similar AP2 domain transcription factors from Arabidopsis are involved in tolerance of plants to freezing (Gilmour et al. (1998) Plant J. 16: 433-442). Analysis of groups of similar genes with similar function that fall within one clade can yield sub-sequences that are particular to the clade. These sub-sequences, known as consensus sequences, can not only be used to define the sequences within each clade, but define the functions of these genes; genes within a clade may contain paralogous sequences, or orthologous sequences that share the same function (see also, for example, Mount (2001), in Bioinformatics: Sequence and Genome Analysis, Cold Spring Harbor Laboratory Press, Cold Spring Harbor, N.Y., p. 543).

[0075] Transcription factor gene sequences are conserved across diverse eukaryotic species lines (Goodrich et al. (1993) Cell 75: 519-530; Lin et al. (1991) Nature 353: 569-571; Sadowski et al. (1988) Nature 335: 563-564). Plants are no exception to this observation; diverse plant species possess transcription factors that have similar sequences and functions. Speciation, the production of new species from a parental species, gives rise to two or more genes with similar sequence and similar function. These genes, termed orthologs, often have an identical function within their host plants and are often interchangeable between species without losing function. Because plants have common ancestors, many genes in any plant species will have a corresponding orthologous gene in another plant species. Once a phylogenic tree for a gene family of one species has been constructed using a program such as CLUSTAL (Thompson et al., supra); Higgins et al., supra) potential orthologous sequences can be placed into the phylogenetic tree and their relationship to genes from the species of interest can be determined. Orthologous sequences can also be identified by a reciprocal BLAST strategy. Once an orthologous sequence has been identified, the function of the ortholog can be deduced from the identified function of the reference sequence.

[0076] By using a phylogenetic analysis, one skilled in the art would recognize that the ability to predict similar functions conferred by closely-related polypeptides is predictable. This predictability has been confirmed by our own many studies in which we have found that a wide variety of polypeptides have orthologous or closely-related homologous sequences that function as does the first, closely-related reference sequence. For example, distinct transcription factors, including:

[0077] (i) AP2 family Arabidopsis G47 (found in U.S. Pat. No. 7,135,616, issued 14 Nov. 2006), a phylogenetically-related sequence from soybean, and two phylogenetically-related homologs from rice all can confer greater tolerance to drought, hyperosmotic stress, or delayed flowering as compared to control plants;

[0078] (ii) CAAT family Arabidopsis G481 (found in PCT patent publication WO2004076638), and numerous phylogenetically-related sequences from dicots and monocots can confer greater tolerance to drought-related stress as compared to control plants;

[0079] (iii) Myb-related Arabidopsis G682 (found in U.S. Pat. No. 7,223,904, issued 29 May 2007) and numerous phylogenetically-related sequences from dicots and monocots can confer greater tolerance to heat, drought-related stress, cold, and salt as compared to control plants;

[0080] (iv) WRKY family Arabidopsis G1274 (found in U.S. Pat. No. 7,196,245, issued 27 Mar. 2007) and numerous closely-related sequences from dicots and monocots have been shown to confer increased water deprivation tolerance, and

[0081] (v) AT-hook family soy sequence G3456 (found in US patent publication US20040128712A1) and numerous phylogenetically-related sequences from dicots and monocots, increased biomass compared to control plants when these sequences are overexpressed in plants.

[0082] The polypeptides sequences belong to distinct clades of polypeptides that include members from diverse species. In each case, most or all of the clade member sequences derived from both dicots and monocots have been shown to confer increased tolerance to one or more abiotic stresses when the sequences were overexpressed, and hence will likely increase yield and or crop quality. These studies each demonstrate that evolutionarily conserved genes from diverse species are likely to function similarly (i.e., by regulating similar target sequences and controlling the same traits), and that polynucleotides from one species may be transformed into closely-related or distantly-related plant species to confer or improve traits.

[0083] At the nucleotide level, the sequences of the invention will typically share at least about 30% or 40% nucleotide sequence identity, preferably at least about 50%, about 60%, about 70% or about 80% sequence identity, and more preferably about 85%, about 90%, about 95% or about 97% or more sequence identity to one or more of the listed full-length sequences, or to a region of a listed sequence excluding or outside of the region(s) encoding a known consensus sequence or consensus DNA-binding site, or outside of the region(s) encoding one or all conserved domains. The degeneracy of the genetic code enables major variations in the nucleotide sequence of a polynucleotide while maintaining the amino acid sequence of the encoded protein.

[0084] At the polypeptide level, the sequences of the invention will typically share at least about 50%, about 60%, about 70% or about 80% sequence identity, and more preferably about 85%, about 90%, about 95% or about 97% or more sequence identity to one or more of the listed full-length sequences, or to a listed sequence but excluding or outside of the known consensus sequence or consensus DNA-binding site.

[0085] Percent identity can be determined electronically, e.g., by using the MEGALIGN program (DNASTAR, Inc. Madison, Wis.). The MEGALIGN program can create alignments between two or more sequences according to different methods, for example, the clustal method (see, for example, Higgins and Sharp (1988) Gene 73: 237-244). The clustal algorithm groups sequences into clusters by examining the distances between all pairs. The clusters are aligned pairwise and then in groups. Other alignment algorithms or programs may be used, including FASTA, BLAST, or ENTREZ, FASTA and BLAST, and which may be used to calculate percent similarity. These are available as a part of the GCG sequence analysis package (University of Wisconsin, Madison, Wis.), and can be used with or without default settings. ENTREZ is available through the National Center for Biotechnology Information. In one embodiment, the percent identity of two sequences can be determined by the GCG program with a gap weight of 1, e.g., each amino acid gap is weighted as if it were a single amino acid or nucleotide mismatch between the two sequences (see U.S. Pat. No. 6,262,333).

[0086] Software for performing BLAST analyses is publicly available, e.g., through the National Center for Biotechnology Information (presently at www.ncbi.nlm.nih.gov). This algorithm involves first identifying high scoring sequence pairs (HSPs) by identifying short words of length W in the query sequence, which either match or satisfy some positive-valued threshold score T when aligned with a word of the same length in a database sequence. T is referred to as the neighborhood word score threshold (Altschul (1990) J. Mol. Biol. 215: 403-410; Altschul (1993) J. Mol. Evol. 36: 290-300). These initial neighborhood word hits act as seeds for initiating searches to find longer HSPs containing them. The word hits are then extended in both directions along each sequence for as far as the cumulative alignment score can be increased. Cumulative scores are calculated using, for nucleotide sequences, the parameters M (reward score for a pair of matching residues; always >0) and N (penalty score for mismatching residues; always <0). For amino acid sequences, a scoring matrix is used to calculate the cumulative score. Extension of the word hits in each direction are halted when: the cumulative alignment score falls off by the quantity X from its maximum achieved value; the cumulative score goes to zero or below, due to the accumulation of one or more negative-scoring residue alignments; or the end of either sequence is reached. The BLAST algorithm parameters W, T, and X determine the sensitivity and speed of the alignment. The BLASTN program (for nucleotide sequences) uses as defaults a wordlength (W) of 11, an expectation (E) of 10, a cutoff of 100, M=5, n=−4, and a comparison of both strands. For amino acid sequences, the BLASTP program uses as defaults a wordlength (W) of 3, an expectation (E) of 10, and the BLOSUM62 scoring matrix (see Henikoff and Henikoff (1989) Proc. Natl. Acad. Sci. USA 89:10915). Unless otherwise indicated for comparisons of predicted polynucleotides, “sequence identity” refers to the % sequence identity generated from a tblastx using the NCBI version of the algorithm at the default settings using gapped alignments with the filter “off” (see, for example, www.ncbi.nlm.nih.gov/).

[0087] Other techniques for alignment are described by Doolittle, (Doolittle, ed. (1996) Methods in Enzymology, vol. 266: “Computer Methods for Macromolecular Sequence Analysis” Academic Press, Inc., San Diego, Calif., USA). Preferably, an alignment program that permits gaps in the sequence is utilized to align the sequences. The Smith-Waterman is one type of algorithm that permits gaps in sequence alignments (see Shpaer (1997) Methods Mol. Biol. 70: 173-187). Also, the GAP program using the Needleman and Wunsch alignment method can be utilized to align sequences. An alternative search strategy uses MPSRCH software, which runs on a MASPAR computer. MPSRCH uses a Smith-Waterman algorithm to score sequences on a massively parallel computer. This approach improves ability to pick up distantly related matches, and is especially tolerant of small gaps and nucleotide sequence errors. Nucleic acid-encoded amino acid sequences can be used to search both protein and DNA databases.

[0088] The percentage similarity between two polypeptide sequences, e.g., sequence A and sequence B, is calculated by dividing the length of sequence A, minus the number of gap residues in sequence A, minus the number of gap residues in sequence B, into the sum of the residue matches between sequence A and sequence B, times one hundred. Gaps of low or of no similarity between the two amino acid sequences are not included in determining percentage similarity. Percent identity between polynucleotide sequences can also be counted or calculated by other methods known in the art, e.g., the Jotun Hein method (see, for example, Hein (1990) Methods Enzymol. 183: 626-645). Identity between sequences can also be determined by other methods known in the art, e.g., by varying hybridization conditions (see US Patent Application No. 20010010913).

[0089] Thus, the invention provides methods for identifying a sequence similar or paralogous or orthologous or homologous to one or more polynucleotides as noted herein, or one or more target polypeptides encoded by the polynucleotides, or otherwise noted herein and may include linking or associating a given plant phenotype or gene function with a sequence. In the methods, a sequence database is provided (locally or across an internet or intranet) and a query is made against the sequence database using the relevant sequences herein and associated plant phenotypes or gene functions.

[0090] In addition, one or more polynucleotide sequences or one or more polypeptides encoded by the polynucleotide sequences may be used to search against a BLOCKS (Bairoch et al. (1997) Nucleic Acids Res. 25: 217-221), PFAM, and other databases which contain previously identified and annotated motifs, sequences and gene functions. Methods that search for primary sequence patterns with secondary structure gap penalties (Smith et al. (1992) Protein Engineering 5: 35-51) as well as algorithms such as Basic Local Alignment Search Tool (BLAST; Altschul, 1990, supra; Altschul et al., 1993, supra), BLOCKS (Henikoff and Henikoff (1991) Nucleic Acids Res. 19: 6565-6572), Hidden Markov Models (HMM; Eddy (1996) Curr. Opin. Str. Biol. 6: 361-365; Sonnhammer et al. (1997) Proteins 28: 405-420), and the like, can be used to manipulate and analyze polynucleotide and polypeptide sequences encoded by polynucleotides. These databases, algorithms and other methods are well known in the art and are described in Ausubel et al. (1997) Short Protocols in Molecular Biology, John Wiley & Sons, New York, N.Y., unit 7.7, and in Meyers (1995) Molecular Biology and Biotechnology, Wiley VCH, New York, N.Y., p 856-853.

[0091] A further method for identifying or confirming that specific homologous sequences control the same function is by comparison of the transcript profile(s) obtained upon overexpression or knockout of two or more related polypeptides. Since transcript profiles are diagnostic for specific cellular states, one skilled in the art will appreciate that genes that have a highly similar transcript profile (e.g., with greater than 50% regulated transcripts in common, or with greater than 70% regulated transcripts in common, or with greater than 90% regulated transcripts in common) will have highly similar functions. Fowler and Thomashow, 2002, have shown that three paralogous AP2 family genes (CBF1, CBF2 and CBF3) are induced upon cold treatment, and each of which can condition improved freezing tolerance, and all have highly similar transcript profiles. Once a polypeptide has been shown to provide a specific function, its transcript profile becomes a diagnostic tool to determine whether paralogs or orthologs have the same function.

[0092] Furthermore, methods using manual alignment of sequences similar or homologous to one or more polynucleotide sequences or one or more polypeptides encoded by the polynucleotide sequences may be used to identify regions of similarity and conserved domains characteristic of a particular transcription factor family. Such manual methods are well-known of those of skill in the art and can include, for example, comparisons of tertiary structure between a polypeptide sequence encoded by a polynucleotide that comprises a known function and a polypeptide sequence encoded by a polynucleotide sequence that has a function not yet determined Such examples of tertiary structure may comprise predicted alpha helices, beta-sheets, amphipathic helices, leucine zipper motifs, zinc finger motifs, proline-rich regions, cysteine repeat motifs, and the like.

[0093] Orthologs and paralogs of presently disclosed polypeptides may be cloned using compositions provided by the present invention according to methods well known in the art. cDNAs can be cloned using mRNA from a plant cell or tissue that expresses one of the present sequences. Appropriate mRNA sources may be identified by interrogating Northern blots with probes designed from the present sequences, after which a library is prepared from the mRNA obtained from a positive cell or tissue. Polypeptide-encoding cDNA is then isolated using, for example, PCR, using primers designed from a presently disclosed gene sequence, or by probing with a partial or complete cDNA or with one or more sets of degenerate probes based on the disclosed sequences. The cDNA library may be used to transform plant cells. Expression of the cDNAs of interest is detected using, for example, microarrays, Northern blots, quantitative PCR, or any other technique for monitoring changes in expression. Genomic clones may be isolated using similar techniques to those.

[0094] Examples of orthologs of the Arabidopsis polypeptide sequences and their functionally similar orthologs are listed in Tables 4 and 5 and the Sequence Listing. In addition to the sequences in Tables 4 and 5 and the Sequence Listing, the invention encompasses isolated nucleotide sequences that are phylogenetically and structurally similar to sequences listed in the Sequence Listing and can function in a plant by increasing yield and/or and abiotic stress tolerance when ectopically expressed in a plant.

[0095] Since a significant number of these sequences are phylogenetically and sequentially related to each other and have been shown to increase a plant's tolerance to one or more abiotic stresses, one skilled in the art would predict that other similar, phylogenetically related sequences falling within the present clades of polypeptides would also perform similar functions when ectopically expressed.

[0096] Identifying Polynucleotides or Nucleic Acids by Hybridization. Polynucleotides homologous to the sequences illustrated in the Sequence Listing and tables can be identified, e.g., by hybridization to each other under stringent or under highly stringent conditions. Single stranded polynucleotides hybridize when they associate based on a variety of well characterized physical-chemical forces, such as hydrogen bonding, solvent exclusion, base stacking and the like. The stringency of a hybridization reflects the degree of sequence identity of the nucleic acids involved, such that the higher the stringency, the more similar are the two polynucleotide strands. Stringency is influenced by a variety of factors, including temperature, salt concentration and composition, organic and non-organic additives, solvents, etc. present in both the hybridization and wash solutions and incubations (and number thereof), as described in more detail in the references cited above. Encompassed by the invention are polynucleotide sequences that are capable of hybridizing to the claimed polynucleotide sequences, and, in particular, to those shown in SEQ ID NOs: 26; 46; 176; 114; 142; 144; 82; 50; 72; 96; 18; 22; 24; and 240, and fragments thereof under various conditions of stringency. (See, e.g., Wahl, G. M. and S. L. Berger (1987) Methods Enzymol. 152:399-407; Kimmel, A. R. (1987) Methods Enzymol. 152:507-511.) Estimates of homology are provided by either DNA-DNA or DNA-RNA hybridization under conditions of stringency as is well understood by those skilled in the art (Hames and Higgins, Eds. (1985) Nucleic Acid Hybridisation, IRL Press, Oxford, U.K.). Stringency conditions can be adjusted to screen for moderately similar fragments, such as homologous sequences from distantly related organisms, to highly similar fragments, such as genes that duplicate functional enzymes from closely related organisms. Post-hybridization washes determine stringency conditions.

[0097] In addition to the nucleotide sequences listed in Tables 4 and 5, full length cDNA, orthologs, paralogs and homologs of the present nucleotide sequences may be identified and isolated using well known methods. The cDNA libraries orthologs, paralogs and homologs of the present nucleotide sequences may be screened using hybridization methods to determine their utility as hybridization target or amplification probes.

[0098] An example of stringent hybridization conditions for hybridization of complementary nucleic acids which have more than 100 complementary residues on a filter in a Southern or northern blot is about 5° C. to 20° C. lower than the thermal melting point (Tₘ) for the specific sequence at a defined ionic strength and pH. The Tₘ is the temperature (under defined ionic strength and pH) at which 50% of the target sequence hybridizes to a perfectly matched probe. Nucleic acid molecules that hybridize under stringent conditions will typically hybridize to a probe based on either the entire cDNA or selected portions, e.g., to a unique subsequence, of the cDNA under wash conditions of 0.2×SSC to 2.0×SSC, 0.1% SDS at 50-65° C. For example, high stringency is about 0.2×SSC, 0.1% SDS at 65° C. Ultra-high stringency will be the same conditions except the wash temperature is raised about 3 to about 5° C., and ultra-ultra-high stringency will be the same conditions except the wash temperature is raised about 6 to about 9° C. For identification of less closely related homologues washes can be performed at a lower temperature, e.g., 50° C. In general, stringency is increased by raising the wash temperature and/or decreasing the concentration of SSC, as known in the art.

[0099] In another example, stringent salt concentration will ordinarily be less than about 750 mM NaCl and 75 mM trisodium citrate, preferably less than about 500 mM NaCl and 50 mM trisodium citrate, and most preferably less than about 250 mM NaCl and 25 mM trisodium citrate. Low stringency hybridization can be obtained in the absence of organic solvent, e.g., formamide, while high stringency hybridization can be obtained in the presence of at least about 35% formamide, and most preferably at least about 50% formamide. Stringent temperature conditions will ordinarily include temperatures of at least about 30° C., more preferably of at least about 37° C., and most preferably of at least about 42° C. Varying additional parameters, such as hybridization time, the concentration of detergent, e.g., sodium dodecyl sulfate (SDS), and the inclusion or exclusion of carrier DNA, are well known to those skilled in the art. Various levels of stringency are accomplished by combining these various conditions as needed. In a preferred embodiment, hybridization will occur at 30° C. in 750 mM NaCl, 75 mM trisodium citrate, and 1% SDS. In a more preferred embodiment, hybridization will occur at 37° C. in 500 mM NaCl, 50 mM trisodium citrate, 1% SDS, 35% formamide, and 100 μg/ml denatured salmon sperm DNA (ssDNA). In a most preferred embodiment, hybridization will occur at 42° C. in 250 mM NaCl, 25 mM trisodium citrate, 1% SDS, 50% formamide, and 200 μg/ml ssDNA. Useful variations on these conditions will be readily apparent to those skilled in the art.

[0100] The washing steps that follow hybridization can also vary in stringency. Wash stringency conditions can be defined by salt concentration and by temperature. As above, wash stringency can be increased by decreasing salt concentration or by increasing temperature. For example, stringent salt concentration for the wash steps will preferably be less than about 30 mM NaCl and 3 mM trisodium citrate, and most preferably less than about 15 mM NaCl and 1.5 mM trisodium citrate. Stringent temperature conditions for the wash steps will ordinarily include temperature of at least about 25° C., more preferably of at least about 42° C. Another preferred set of highly stringent conditions uses two final washes in 0.1×SSC, 0.1% SDS at 65° C. The most preferred high stringency washes are of at least about 68° C. For example, in a preferred embodiment, wash steps will occur at 25° C. in 30 mM NaCl, 3 mM trisodium citrate, and 0.1% SDS. In a more preferred embodiment, wash steps will occur at 42° C. in 15 mM NaCl, 1.5 mM trisodium citrate, and 0.1% SDS. In a most preferred embodiment, the wash steps will occur at 68° C. in 15 mM NaCl, 1.5 mM trisodium citrate, and 0.1% SDS. Additional variations on these conditions will be readily apparent to those skilled in the art (see U.S. Patent Application No. 20010010913).

[0101] As another example, stringent conditions can be selected such that an oligonucleotide that is perfectly complementary to the coding oligonucleotide hybridizes to the coding oligonucleotide with at least about a 5-10× higher signal to noise ratio than the ratio for hybridization of the perfectly complementary oligonucleotide to a nucleic acid encoding a transcription factor known as of the filing date of the application. Conditions can be selected such that a higher signal to noise ratio is observed in the particular assay which is used, e.g., about 15×, 25×, 35×, 50× or more. Accordingly, the subject nucleic acid hybridizes to the unique coding oligonucleotide with at least a 2× higher signal to noise ratio as compared to hybridization of the coding oligonucleotide to a nucleic acid encoding known polypeptide. Again, higher signal to noise ratios can be selected, e.g., about 5×, 10×, 25×, 35×, 50× or more. The particular signal will depend on the label used in the relevant assay, e.g., a fluorescent label, a colorimetric label, a radioactive label, or the like.

[0102] Alternatively, transcription factor homolog polypeptides can be obtained by screening an expression library using antibodies specific for one or more transcription factors. With the provision herein of the disclosed transcription factor, and transcription factor homologue nucleic acid sequences, the encoded polypeptide(s) can be expressed and purified in a heterologous expression system (e.g., E. coli) and used to raise antibodies (monoclonal or polyclonal) specific for the polypeptide(s) in question. Antibodies can also be raised against synthetic peptides derived from transcription factor, or transcription factor homologue, amino acid sequences. Methods of raising antibodies are well known in the art and are described in Harlow and Lane (1988) Antibodies: A Laboratory Manual, Cold Spring Harbor Laboratory, New York. Such antibodies can then be used to screen an expression library produced from the plant from which it is desired to clone additional transcription factor homologues, using the methods described above. The selected cDNAs can be confirmed by sequencing and enzymatic activity.

[0103] Sequence Variations. It will readily be appreciated by those of skill in the art, that any of a variety of polynucleotide sequences are capable of encoding the transcription factors and transcription factor homologue polypeptides of the invention. Due to the degeneracy of the genetic code, many different polynucleotides can encode identical and/or substantially similar polypeptides in addition to those sequences illustrated in the Sequence Listing. Nucleic acids having a sequence that differs from the sequences shown in the Sequence Listing, or complementary sequences, that encode functionally equivalent peptides (i.e., peptides having some degree of equivalent or similar biological activity) but differ in sequence from the sequence shown in the sequence listing due to degeneracy in the genetic code, are also within the scope of the invention.

[0104] Altered polynucleotide sequences encoding polypeptides include those sequences with deletions, insertions, or substitutions of different nucleotides, resulting in a polynucleotide encoding a polypeptide with at least one functional characteristic of the instant polypeptides. Included within this definition are polymorphisms which may or may not be readily detectable using a particular oligonucleotide probe of the polynucleotide encoding the instant polypeptides, and improper or unexpected hybridization to allelic variants, with a locus other than the normal chromosomal locus for the polynucleotide sequence encoding the instant polypeptides.

[0105] Allelic variant refers to any of two or more alternative forms of a gene occupying the same chromosomal locus. Allelic variation arises naturally through mutation, and may result in phenotypic polymorphism within populations. Gene mutations can be silent (i.e., no change in the encoded polypeptide) or may encode polypeptides having altered amino acid sequence. The term allelic variant is also used herein to denote a protein encoded by an allelic variant of a gene. Splice variant refers to alternative forms of RNA transcribed from a gene. Splice variation arises naturally through use of alternative splicing sites within a transcribed RNA molecule, or less commonly between separately transcribed RNA molecules, and may result in several mRNAs transcribed from the same gene. Splice variants may encode polypeptides having altered amino acid sequence. The term splice variant is also used herein to denote a protein encoded by a splice variant of an mRNA transcribed from a gene.

[0106] Those skilled in the art would recognize that G481, SEQ ID NO: 114, represents a single transcription factor; allelic variation and alternative splicing may be expected to occur. Allelic variants of SEQ ID NO: 113 can be cloned by probing cDNA or genomic libraries from different individual organisms according to standard procedures. Allelic variants of the DNA sequence shown in SEQ ID NO:113, including those containing silent mutations and those in which mutations result in amino acid sequence changes, are within the scope of the present invention, as are proteins which are allelic variants of SEQ ID NO: 114. cDNAs generated from alternatively spliced mRNAs, which retain the properties of the transcription factor are included within the scope of the present invention, as are polypeptides encoded by such cDNAs and mRNAs. Allelic variants and splice variants of these sequences can be cloned by probing cDNA or genomic libraries from different individual organisms or tissues according to standard procedures known in the art (see U.S. Pat. No. 6,388,064).

[0107] For example, Table 1 illustrates, e.g., that the codons AGC, AGT, TCA, TCC, TCG, and TCT all encode the same amino acid: serine. Accordingly, at each position in the sequence where there is a codon encoding serine, any of the above trinucleotide sequences can be used without altering the encoded polypeptide.

TABLE 1

| Amino acid | | | Possible Codons |
|---|---|---|---|
| Alanine | Ala | A | GCA GCC GCG GCU |
| Cysteine | Cys | C | TGC TGT |
| Aspartic acid | Asp | D | GAC GAT |
| Glutamic acid | Glu | E | GAA GAG |
| Phenylalanine | Phe | F | TTC TTT |
| Glycine | Gly | G | GGA GGC GGG GGT |
| Histidine | His | H | CAC CAT |
| Isoleucine | Ile | I | ATA ATC ATT |
| Lysine | Lys | K | AAA AAG |
| Leucine | Leu | L | TTA TTG CTA CTC CTG CTT |
| Methionine | Met | M | ATG |
| Asparagine | Asn | N | AAC AAT |
| Proline | Pro | P | CCA CCC CCG CCT |
| Glutamine | Gln | Q | CAA CAG |
| Arginine | Arg | R | AGA AGG CGA CGC CGG CGT |
| Serine | Ser | S | AGC AGT TCA TCC TCG TCT |
| Threonine | Thr | T | ACA ACC ACG ACT |
| Valine | Val | V | GTA GTC GTG GTT |
| Tryptophan | Trp | W | TGG |
| Tyrosine | Tyr | Y | TAC TAT |

[0108] Sequence alterations that do not change the amino acid sequence encoded by the polynucleotide are termed “silent” variations. With the exception of the codons ATG and TGG, encoding methionine and tryptophan, respectively, any of the possible codons for the same amino acid can be substituted by a variety of techniques, e.g., site-directed mutagenesis, available in the art. Accordingly, any and all such variations of a sequence selected from the above table are a feature of the invention.

[0109] In addition to silent variations, other conservative variations that alter one, or a few amino acids in the encoded polypeptide, can be made without altering the function of the polypeptide, these conservative variants are, likewise, a feature of the invention.

[0110] For example, substitutions, deletions and insertions introduced into the sequences provided in the Sequence Listing are also envisioned by the invention. Such sequence modifications can be engineered into a sequence by site-directed mutagenesis (Wu (ed.) Meth. Enzymol. (1993) vol. 217, Academic Press) or the other methods noted below. Amino acid substitutions are typically of single residues; insertions usually will be on the order of about from 1 to 10 amino acid residues; and deletions will range about from 1 to 30 residues. In preferred embodiments, deletions or insertions are made in adjacent pairs, e.g., a deletion of two residues or insertion of two residues. Substitutions, deletions, insertions or any combination thereof can be combined to arrive at a sequence. The mutations that are made in the polynucleotide encoding the transcription factor should not place the sequence out of reading frame and should not create complementary regions that could produce secondary mRNA structure. Preferably, the polypeptide encoded by the DNA performs the desired function.

[0111] Conservative substitutions are those in which at least one residue in the amino acid sequence has been removed and a different residue inserted in its place. Such substitutions generally are made in accordance with the Table 2 when it is desired to maintain the activity of the protein. Table 2 shows amino acids which can be substituted for an amino acid in a protein and which are typically regarded as conservative substitutions.

TABLE 2

| | Conservative |
|---|---|
| Residue | Substitutions |
| Ala | Ser |
| Arg | Lys |
| Asn | Gln; His |
| Asp | Glu |
| Gln | Asn |
| Cys | Ser |
| Glu | Asp |
| Gly | Pro |
| His | Asn; Gln |
| Ile | Leu, Val |
| Leu | Ile; Val |
| Lys | Arg; Gln |
| Met | Leu; Ile |
| Phe | Met; Leu; Tyr |
| Ser | Thr; Gly |
| Thr | Ser; Val |
| Trp | Tyr |
| Tyr | Trp; Phe |
| Val | Ile; Leu |

[0112] The polypeptides provided in the Sequence Listing have a novel activity, such as, for example, regulatory activity. Although all conservative amino acid substitutions (for example, one basic amino acid substituted for another basic amino acid) in a polypeptide will not necessarily result in the polypeptide retaining its activity, it is expected that many of these conservative mutations would result in the polypeptide retaining its activity. Most mutations, conservative or non-conservative, made to a protein but outside of a conserved domain required for function and protein activity will not affect the activity of the protein to any great extent.

[0113] Similar substitutions are those in which at least one residue in the amino acid sequence has been removed and a different residue inserted in its place. Such substitutions generally are made in accordance with the Table 3 when it is desired to maintain the activity of the protein. Table 3 shows amino acids which can be substituted for an amino acid in a protein and which are typically regarded as structural and functional substitutions. For example, a residue in column 1 of Table 3 may be substituted with residue in column 2; in addition, a residue in column 2 of Table 3 may be substituted with the residue of column 1.

TABLE 3

| Residue | Similar Substitutions |
|---|---|
| Ala | Ser; Thr; Gly; Val; Leu; Ile |
| Arg | Lys; His; Gly |
| Asn | Gln; His; Gly; Ser; Thr |
| Asp | Glu, Ser; Thr |
| Gln | Asn; Ala |
| Cys | Ser; Gly |
| Glu | Asp |
| Gly | Pro; Arg |
| His | Asn; Gln; Tyr; Phe; Lys; Arg |
| Ile | Ala; Leu; Val; Gly; Met |
| Leu | Ala; Ile; Val; Gly; Met |
| Lys | Arg; His; Gln; Gly; Pro |
| Met | Leu; Ile; Phe |
| Phe | Met; Leu; Tyr; Trp; His; Val; Ala |
| Ser | Thr; Gly; Asp; Ala; Val; Ile; His |
| Thr | Ser; Val; Ala; Gly |
| Trp | Tyr; Phe; His |
| Tyr | Trp; Phe; His |
| Val | Ala; Ile; Leu; Gly; Thr; Ser; Glu |

[0114] Substitutions that are less conservative than those in Table 2 can be selected by picking residues that differ more significantly in their effect on maintaining (a) the structure of the polypeptide backbone in the area of the substitution, for example, as a sheet or helical conformation, (b) the charge or hydrophobicity of the molecule at the target site, or (c) the bulk of the side chain. The substitutions which in general are expected to produce the greatest changes in protein properties will be those in which (a) a hydrophilic residue, e.g., seryl or threonyl, is substituted for (or by) a hydrophobic residue, e.g., leucyl, isoleucyl, phenylalanyl, valyl or alanyl; (b) a cysteine or proline is substituted for (or by) any other residue; (c) a residue having an electropositive side chain, e.g., lysyl, arginyl, or histidyl, is substituted for (or by) an electronegative residue, e.g., glutamyl or aspartyl; or (d) a residue having a bulky side chain, e.g., phenylalanine, is substituted for (or by) one not having a side chain, e.g., glycine.

[0115] Further Modifying Sequences of the Invention—Mutation/Forced Evolution. In addition to generating silent or conservative substitutions as noted, above, the present invention optionally includes methods of modifying the sequences of the Sequence Listing. In the methods, nucleic acid or protein modification methods are used to alter the given sequences to produce new sequences and/or to chemically or enzymatically modify given sequences to change the properties of the nucleic acids or proteins.

[0116] Thus, in one embodiment, given nucleic acid sequences are modified, e.g., according to standard mutagenesis or artificial evolution methods to produce modified sequences. The modified sequences may be created using purified natural polynucleotides isolated from any organism or may be synthesized from purified compositions and chemicals using chemical means well know to those of skill in the art. For example, Ausubel, supra, provides additional details on mutagenesis methods. Artificial forced evolution methods are described, for example, by Stemmer (1994) Nature 370:389-391, Stemmer (1994) Proc. Natl. Acad. Sci. USA 91:10747-10751, and U.S. Pat. Nos. 5,811,238, 5,837,500, and 6,242,568. Methods for engineering synthetic transcription factors and other polypeptides are described, for example, by Zhang et al. (2000) J. Biol. Chem. 275:33850-33860, Liu et al. (2001) J. Biol. Chem. 276:11323-11334, and Isalan et al. (2001) Nature Biotechnol. 19:656-660. Many other mutation and evolution methods are also available and expected to be within the skill of the practitioner.

[0117] Similarly, chemical or enzymatic alteration of expressed nucleic acids and polypeptides can be performed by standard methods. For example, sequence can be modified by addition of lipids, sugars, peptides, organic or inorganic compounds, by the inclusion of modified nucleotides or amino acids, or the like. For example, protein modification techniques are illustrated in Ausubel, supra. Further details on chemical and enzymatic modifications can be found herein. These modification methods can be used to modify any given sequence, or to modify any sequence produced by the various mutation and artificial evolution modification methods noted herein.

[0118] Accordingly, the invention provides for modification of any given nucleic acid by mutation, evolution, chemical or enzymatic modification, or other available methods, as well as for the products produced by practicing such methods, e.g., using the sequences herein as a starting substrate for the various modification approaches.

[0119] For example, optimized coding sequence containing codons preferred by a particular prokaryotic or eukaryotic host can be used e.g., to increase the rate of translation or to produce recombinant RNA transcripts having desirable properties, such as a longer half-life, as compared with transcripts produced using a non-optimized sequence. Translation stop codons can also be modified to reflect host preference. For example, preferred stop codons for Saccharomyces cerevisiae and mammals are TAA and TGA, respectively. The preferred stop codon for monocotyledonous plants is TGA, whereas insects and E. coli prefer to use TAA as the stop codon.

[0120] The polynucleotide sequences of the present invention can also be engineered in order to alter a coding sequence for a variety of reasons, including but not limited to, alterations which modify the sequence to facilitate cloning, processing and/or expression of the gene product. For example, alterations are optionally introduced using techniques which are well known in the art, e.g., site-directed mutagenesis, to insert new restriction sites, to alter glycosylation patterns, to change codon preference, to introduce splice sites, etc.

[0121] Furthermore, a fragment or domain derived from any of the polypeptides of the invention can be combined with domains derived from other transcription factors or synthetic domains to modify the biological activity of a transcription factor. For instance, a DNA-binding domain derived from a transcription factor of the invention can be combined with the activation domain of another transcription factor or with a synthetic activation domain. A transcription activation domain assists in initiating transcription from a DNA-binding site. Examples include the transcription activation region of VP16 or GAL4 (Moore et al. (1998) Proc. Natl. Acad. Sci. USA 95: 376-381; and Aoyama et al. (1995) Plant Cell 7:1773-1785), peptides derived from bacterial sequences (Ma and Ptashne (1987) Cell 51; 113-119) and synthetic peptides (Giniger and Ptashne, (1987) Nature 330:670-672).

[0122] Expression and Modification of Polypeptides. Typically, polynucleotide sequences of the invention are incorporated into recombinant DNA (or RNA) molecules that direct expression of polypeptides of the invention in appropriate host cells, transgenic plants, in vitro translation systems, or the like. Due to the inherent degeneracy of the genetic code, nucleic acid sequences which encode substantially the same or a functionally equivalent amino acid sequence can be substituted for any listed sequence to provide for cloning and expressing the relevant homologue.

[0123] Vectors, Promoters, and Expression Systems. The present invention includes recombinant constructs comprising one or more of the nucleic acid sequences herein. The constructs typically comprise a vector, such as a plasmid, a cosmid, a phage, a virus (e.g., a plant virus), a bacterial artificial chromosome (BAC), a yeast artificial chromosome (YAC), or the like, into which a nucleic acid sequence of the invention has been inserted, in a forward or reverse orientation. In a preferred aspect of this embodiment, the construct further comprises regulatory sequences, including, for example, a promoter, operably linked to the sequence. Large numbers of suitable vectors and promoters are known to those of skill in the art, and are commercially available.

[0124] General texts that describe molecular biological techniques useful herein, including the use and production of vectors, promoters and many other relevant topics, include Berger, Sambrook and Ausubel, supra. Any of the identified sequences can be incorporated into a cassette or vector, e.g., for expression in plants. A number of expression vectors suitable for stable transformation of plant cells or for the establishment of transgenic plants have been described including those described in Weissbach and Weissbach, (1989) Methods for Plant Molecular Biology, Academic Press, and Gelvin et al., (1990) Plant Molecular Biology Manual, Kluwer Academic Publishers. Specific examples include those derived from a Ti plasmid of Agrobacterium tumefaciens, as well as those disclosed by Herrera-Estrella et al. (1983) Nature 303: 209, Bevan (1984) Nucl Acid Res. 12: 8711-8721, Klee (1985) Bio/Technology 3: 637-642, for dicotyledonous plants.

[0125] Alternatively, non-Ti vectors can be used to transfer the DNA into monocotyledonous plants and cells by using free DNA delivery techniques. Such methods can involve, for example, the use of liposomes, electroporation, microprojectile bombardment, silicon carbide whiskers, and viruses. By using these methods transgenic plants such as wheat, rice (Christou (1991) Bio/Technology 9: 957-962) and corn (Gordon-Kamm (1990) Plant Cell 2: 603-618) can be produced. An immature embryo can also be a good target tissue for monocots for direct DNA delivery techniques by using the particle gun (Weeks et al. (1993) Plant Physiol 102: 1077-1084; Vasil (1993) Bio/Technology 10: 667-674; Wan and Lemeaux (1994) Plant Physiol 104: 37-48, and for Agrobacterium-mediated DNA transfer (Ishida et al. (1996) Nature Biotech 14: 745-750).

[0126] Typically, plant transformation vectors include one or more cloned plant coding sequence (genomic or cDNA) under the transcriptional control of 5′ and 3′ regulatory sequences and a dominant selectable marker. Such plant transformation vectors typically also contain a promoter (e.g., a regulatory region controlling inducible or constitutive, environmentally- or developmentally-regulated, or cell- or tissue-specific expression), a transcription initiation start site, an RNA processing signal (such as intron splice sites), a transcription termination site, and/or a polyadenylation signal.

[0127] Examples of constitutive plant promoters which can be useful for expressing the TF sequence include: the cauliflower mosaic virus (CaMV) 35S promoter, which confers constitutive, high-level expression in most plant tissues (see, e.g., Odell et al. (1985) Nature 313:810-812); the nopaline synthase promoter (An et al. (1988) Plant Physiol 88:547-552); and the octopine synthase promoter (Fromm et al. (1989) Plant Cell 1: 977-984).

[0128] A variety of plant gene promoters that regulate gene expression in response to environmental, hormonal, chemical, developmental signals, and in a tissue-active manner can be used for expression of a TF sequence in plants. Choice of a promoter is based largely on the phenotype of interest and is determined by such factors as tissue (e.g., seed, fruit, root, pollen, vascular tissue, flower, carpel, etc.), inducibility (e.g., in response to wounding, heat, cold, drought, light, pathogens, etc.), timing, developmental stage, and the like. Numerous known promoters have been characterized and can favorably be employed to promote expression of a polynucleotide of the invention in a transgenic plant or cell of interest. For example, tissue specific promoters include: seed-specific promoters (such as the napin, phaseolin or DC3 promoter described in U.S. Pat. No. 5,773,697), fruit-specific promoters that are active during fruit ripening (such as the dru 1 promoter (U.S. Pat. No. 5,783,393), or the 2A11 promoter (U.S. Pat. No. 4,943,674) and the tomato polygalacturonase promoter (Bird et al. (1988) Plant Mol Biol 11:651), root-specific promoters, such as those disclosed in U.S. Pat. Nos. 5,618,988, 5,837,848 and 5,905,186, pollen-active promoters such as PTA29, PTA26 and PTA13 (U.S. Pat. No. 5,792,929), promoters active in vascular tissue (Ringli and Keller (1998) Plant Mol Biol 37:977-988), flower-specific (Kaiser et al, (1995) Plant Mol Biol 28:231-243), pollen (Baerson et al. (1994) Plant Mol Biol 26:1947-1959), carpels (Ohl et al. (1990) Plant Cell 2:837-848), pollen and ovules (Baerson et al. (1993) Plant Mol Biol 22:255-267), auxin-inducible promoters (such as that described in van der Kop et al. (1999) Plant Mol Biol 39:979-990 or Baumann et al. (1999) Plant Cell 11:323-334), cytokinin-inducible promoter (Guevara-Garcia (1998) Plant Mol Biol 38:743-753), promoters responsive to gibberellin (Shi et al. (1998) Plant Mol Biol 38:1053-1060, Willmott et al. (1998) 38:817-825) and the like. Additional promoters are those that elicit expression in response to heat (Ainley et al. (1993) Plant Mol Biol 22: 13-23), light (e.g., the pea rbcS-3A promoter, Kuhlemeier et al. (1989) Plant Cell 1:471, and the maize rbcS promoter, Schaffner and Sheen (1991) Plant Cell 3: 997); wounding (e.g., wunl, Siebertz et al. (1989) Plant Cell 1: 961); pathogens (such as the PR-1 promoter described in Buchel et al. (1999) Plant Mol. Biol. 40:387-396, and the PDF1.2 promoter described in Manners et al. (1998) Plant Mol. Biol. 38:1071-80), and chemicals such as methyl jasmonate or salicylic acid (Gatz et al. (1997) Plant Mol Biol 48: 89-108). In addition, the timing of the expression can be controlled by using promoters such as those acting at senescence (An and Amazon (1995) Science 270: 1986-1988); or late seed development (Odell et al. (1994) Plant Physiol 106:447-458).

[0129] Plant expression vectors can also include RNA processing signals that can be positioned within, upstream or downstream of the coding sequence. In addition, the expression vectors can include additional regulatory sequences from the 3′-untranslated region of plant genes, e.g., a 3′ terminator region to increase mRNA stability of the mRNA, such as the PI-II terminator region of potato or the octopine or nopaline synthase 3′ terminator regions.

[0130] Additional Expression Elements. Specific initiation signals can aid in efficient translation of coding sequences. These signals can include, e.g., the ATG initiation codon and adjacent sequences. In cases where a coding sequence, its initiation codon and upstream sequences are inserted into the appropriate expression vector, no additional translational control signals may be needed. However, in cases where only coding sequence (e.g., a mature protein coding sequence), or a portion thereof, is inserted, exogenous transcriptional control signals including the ATG initiation codon can be separately provided. The initiation codon is provided in the correct reading frame to facilitate transcription. Exogenous transcriptional elements and initiation codons can be of various origins, both natural and synthetic. The efficiency of expression can be enhanced by the inclusion of enhancers appropriate to the cell system in use.

[0131] Expression Hosts. The present invention also relates to host cells which are transduced with vectors of the invention, and the production of polypeptides of the invention (including fragments thereof) by recombinant techniques. Host cells are genetically engineered (i.e., nucleic acids are introduced, e.g., transduced, transformed or transfected) with the vectors of this invention, which may be, for example, a cloning vector or an expression vector comprising the relevant nucleic acids herein. The vector is optionally a plasmid, a viral particle, a phage, a naked nucleic acid, etc. The engineered host cells can be cultured in conventional nutrient media modified as appropriate for activating promoters, selecting transformants, or amplifying the relevant gene. The culture conditions, such as temperature, pH and the like, are those previously used with the host cell selected for expression, and will be apparent to those skilled in the art and in the references cited herein, including, Sambrook and Ausubel.

[0132] The host cell can be a eukaryotic cell, such as a yeast cell, or a plant cell, or the host cell can be a prokaryotic cell, such as a bacterial cell. Plant protoplasts are also suitable for some applications. For example, the DNA fragments are introduced into plant tissues, cultured plant cells or plant protoplasts by standard methods including electroporation (Fromm et al., (1985) Proc. Natl. Acad. Sci. USA 82, 5824, infection by viral vectors such as cauliflower mosaic virus (CaMV) (Hohn et al., (1982) Molecular Biology of Plant Tumors, (Academic Press, New York) pp. 549-560; U.S. Pat. No. 4,407,956), high velocity ballistic penetration by small particles with the nucleic acid either within the matrix of small beads or particles, or on the surface (Klein et al., (1987) Nature 327, 70-73), use of pollen as vector (WO 85/01856), or use of Agrobacterium tumefaciens or A. rhizogenes carrying a T-DNA plasmid in which DNA fragments are cloned. The T-DNA plasmid is transmitted to plant cells upon infection by Agrobacterium tumefaciens, and a portion is stably integrated into the plant genome (Horsch et al. (1984) Science 233:496-498; Fraley et al. (1983) Proc. Natl. Acad. Sci. USA 80, 4803).

[0133] The cell can include a nucleic acid of the invention which encodes a polypeptide,

[0134] wherein the cell expresses a polypeptide of the invention. The cell can also include vector sequences, or the like. Furthermore, cells and transgenic plants that include any polypeptide or nucleic acid above or throughout this specification, e.g., produced by transduction of a vector of the invention, are an additional feature of the invention.

[0135] For long-term, high-yield production of recombinant proteins, stable expression can be used. Host cells transformed with a nucleotide sequence encoding a polypeptide of the invention are optionally cultured under conditions suitable for the expression and recovery of the encoded protein from cell culture. The protein or fragment thereof produced by a recombinant cell may be secreted, membrane-bound, or contained intracellularly, depending on the sequence and/or the vector used. As will be understood by those of skill in the art, expression vectors containing polynucleotides encoding mature proteins of the invention can be designed with signal sequences which direct secretion of the mature polypeptides through a prokaryotic or eukaryotic cell membrane.

[0136] Modified Amino Acid Residues. Polypeptides of the invention may contain one or more modified amino acid residues. The presence of modified amino acids may be advantageous in, for example, increasing polypeptide half-life, reducing polypeptide antigenicity or toxicity, increasing polypeptide storage stability, or the like. Amino acid residue(s) are modified, for example, co-translationally or post-translationally during recombinant production or modified by synthetic or chemical means.

[0137] Non-limiting examples of a modified amino acid residue include incorporation or other use of acetylated amino acids, glycosylated amino acids, sulfated amino acids, prenylated (e.g., farnesylated, geranylgeranylated) amino acids, PEG modified (e.g., “PEGylated”) amino acids, biotinylated amino acids, carboxylated amino acids, phosphorylated amino acids, etc. References adequate to guide one of skill in the modification of amino acid residues are replete throughout the literature.

[0138] The modified amino acid residues may prevent or increase affinity of the polypeptide for another molecule, including, but not limited to, polynucleotide, proteins, carbohydrates, lipids and lipid derivatives, and other organic or synthetic compounds.

[0139] Identification of Additional Factors. A transcription factor provided by the present invention can also be used to identify additional endogenous or exogenous molecules that can affect a phentoype or trait of interest. On the one hand, such molecules include organic (small or large molecules) and/or inorganic compounds that affect expression of (i.e., regulate) a particular transcription factor. Alternatively, such molecules include endogenous molecules that are acted upon either at a transcriptional level by a transcription factor of the invention to modify a phenotype as desired. For example, the transcription factors can be employed to identify one or more downstream gene with which is subject to a regulatory effect of the transcription factor. In one approach, a transcription factor or transcription factor homologue of the invention is expressed in a host cell, e.g., a transgenic plant cell, tissue or explant, and expression products, either RNA or protein, of likely or random targets are monitored, e.g., by hybridization to a microarray of nucleic acid probes corresponding to genes expressed in a tissue or cell type of interest, by two-dimensional gel electrophoresis of protein products, or by any other method known in the art for assessing expression of gene products at the level of RNA or protein. Alternatively, a transcription factor of the invention can be used to identify promoter sequences (i.e., binding sites) involved in the regulation of a downstream target. After identifying a promoter sequence, interactions between the transcription factor and the promoter sequence can be modified by changing specific nucleotides in the promoter sequence or specific amino acids in the transcription factor that interact with the promoter sequence to alter a plant trait. Typically, transcription factor DNA-binding sites are identified by gel shift assays. After identifying the promoter regions, the promoter region sequences can be employed in double-stranded DNA arrays to identify molecules that affect the interactions of the transcription factors with their promoters (Bulyk et al. (1999) Nature Biotechnology 17:573-577).

[0140] The identified transcription factors are also useful to identify proteins that modify the activity of the transcription factor. Such modification can occur by covalent modification, such as by phosphorylation, or by protein-protein (homo or -heteropolymer) interactions. Any method suitable for detecting protein-protein interactions can be employed. Among the methods that can be employed are co-immunoprecipitation, cross-linking and co-purification through gradients or chromatographic columns, and the two-hybrid yeast system.

[0141] The two-hybrid system detects protein interactions in vivo and is described in Chien et al. ((1991), Proc. Natl. Acad. Sci. USA 88:9578-9582) and is commercially available from Clontech (Palo Alto, Calif.). In such a system, plasmids are constructed that encode two hybrid proteins: one consists of the DNA-binding domain of a transcription activator protein fused to the TF polypeptide and the other consists of the transcription activator protein's activation domain fused to an unknown protein that is encoded by a cDNA that has been recombined into the plasmid as part of a cDNA library. The DNA-binding domain fusion plasmid and the cDNA library are transformed into a strain of the yeast Saccharomyces cerevisiae that contains a reporter gene (e.g., lacZ) whose regulatory region contains the transcription activator's binding site. Either hybrid protein alone cannot activate transcription of the reporter gene. Interaction of the two hybrid proteins reconstitutes the functional activator protein and results in expression of the reporter gene, which is detected by an assay for the reporter gene product. Then, the library plasmids responsible for reporter gene expression are isolated and sequenced to identify the proteins encoded by the library plasmids. After identifying proteins that interact with the transcription factors, assays for compounds that interfere with the TF protein-protein interactions can be preformed.

[0142] Identification of Modulators. In addition to the intracellular molecules described above, extracellular molecules that alter activity or expression of a transcription factor, either directly or indirectly, can be identified. For example, the methods can entail first placing a candidate molecule in contact with a plant or plant cell. The molecule can be introduced by topical administration, such as spraying or soaking of a plant, and then the molecule's effect on the expression or activity of the TF polypeptide or the expression of the polynucleotide monitored. Changes in the expression of the TF polypeptide can be monitored by use of polyclonal or monoclonal antibodies, gel electrophoresis or the like. Changes in the expression of the corresponding polynucleotide sequence can be detected by use of microarrays, Northerns, quantitative PCR, or any other technique for monitoring changes in mRNA expression. These techniques are exemplified in Ausubel et al. (eds) Current Protocols in Molecular Biology, John Wiley & Sons (1998, and supplements through 2001). Such changes in the expression levels can be correlated with modified plant traits and thus identified molecules can be useful for soaking or spraying on fruit, vegetable and grain crops to modify traits in plants.

[0143] Essentially any available composition can be tested for modulatory activity of expression or activity of any nucleic acid or polypeptide herein. Thus, available libraries of compounds such as chemicals, polypeptides, nucleic acids and the like can be tested for modulatory activity. Often, potential modulator compounds can be dissolved in aqueous or organic (e.g., DMSO-based) solutions for easy delivery to the cell or plant of interest in which the activity of the modulator is to be tested. Optionally, the assays are designed to screen large modulator composition libraries by automating the assay steps and providing compounds from any convenient source to assays, which are typically run in parallel (e.g., in microtiter formats on microtiter plates in robotic assays).

[0144] In one embodiment, high throughput screening methods involve providing a combinatorial library containing a large number of potential compounds (potential modulator compounds). Such “combinatorial chemical libraries” are then screened in one or more assays, as described herein, to identify those library members (particular chemical species or subclasses) that display a desired characteristic activity. The compounds thus identified can serve as target compounds.

[0145] A combinatorial chemical library can be, e.g., a collection of diverse chemical compounds generated by chemical synthesis or biological synthesis. For example, a combinatorial chemical library such as a polypeptide library is formed by combining a set of chemical building blocks (e.g., in one example, amino acids) in every possible way for a given compound length (i.e., the number of amino acids in a polypeptide compound of a set length). Exemplary libraries include peptide libraries, nucleic acid libraries, antibody libraries (see, e.g., Vaughn et al. (1996) Nature Biotechnology, 14(3):309-314 and PCT/US96/10287), carbohydrate libraries (see, e.g., Liang et al. Science (1996) 274:1520-1522 and U.S. Pat. No. 5,593,853), peptide nucleic acid libraries (see, e.g., U.S. Pat. No. 5,539,083), and small organic molecule libraries (see, e.g., benzodiazepines, Baum C&EN January 18, page 33 (1993); isoprenoids, U.S. Pat. No. 5,569,588; thiazolidinones and metathiazanones, U.S. Pat. No. 5,549,974; pyrrolidines, U.S. Pat. Nos. 5,525,735 and 5,519,134; morpholino compounds, U.S. Pat. No. 5,506,337) and the like.

[0146] Preparation and screening of combinatorial or other libraries is well known to those of skill in the art. Such combinatorial chemical libraries include, but are not limited to, peptide libraries (see, e.g., U.S. Pat. No. 5,010,175; Furka, (1991) Int. J. Pept. Prot. Res. 37:487-493; and Houghton et al. (1991) Nature 354:84-88). Other chemistries for generating chemical diversity libraries can also be used.

[0147] In addition, as noted, compound screening equipment for high-throughput screening is generally available, e.g., using any of a number of well known robotic systems that have also been developed for solution phase chemistries useful in assay systems. These systems include automated workstations including an automated synthesis apparatus and robotic systems utilizing robotic arms. Any of the above devices are suitable for use with the present invention, e.g., for high-throughput screening of potential modulators. The nature and implementation of modifications to these devices (if any) so that they can operate as discussed herein will be apparent to persons skilled in the relevant art.

[0148] Indeed, entire high throughput screening systems are commercially available. These systems typically automate entire procedures including all sample and reagent pipetting, liquid dispensing, timed incubations, and final readings of the microplate in detector(s) appropriate for the assay. These configurable systems provide high throughput and rapid start up as well as a high degree of flexibility and customization. Similarly, microfluidic implementations of screening are also commercially available.

[0149] The manufacturers of such systems provide detailed protocols the various high throughput. Thus, for example, Zymark Corp. provides technical bulletins describing screening systems for detecting the modulation of gene transcription, ligand binding, and the like. The integrated systems herein, in addition to providing for sequence alignment and, optionally, synthesis of relevant nucleic acids, can include such screening apparatus to identify modulators that have an effect on one or more polynucleotides or polypeptides according to the present invention.

[0150] In some assays it is desirable to have positive controls to ensure that the components of the assays are working properly. At least two types of positive controls are appropriate. That is, known transcriptional activators or inhibitors can be incubated with cells/plants/etc. in one sample of the assay, and the resulting increase/decrease in transcription can be detected by measuring the resulting increase in RNA/protein expression, etc., according to the methods herein. It will be appreciated that modulators can also be combined with transcriptional activators or inhibitors to find modulators that inhibit transcriptional activation or transcriptional repression. Either expression of the nucleic acids and proteins herein or any additional nucleic acids or proteins activated by the nucleic acids or proteins herein, or both, can be monitored.

[0151] In an embodiment, the invention provides a method for identifying compositions that modulate the activity or expression of a polynucleotide or polypeptide of the invention. For example, a test compound, whether a small or large molecule, is placed in contact with a cell, plant (or plant tissue or explant), or composition comprising the polynucleotide or polypeptide of interest and a resulting effect on the cell, plant, (or tissue or explant) or composition is evaluated by monitoring, either directly or indirectly, one or more of: expression level of the polynucleotide or polypeptide, activity (or modulation of the activity) of the polynucleotide or polypeptide. In some cases, an alteration in a plant phenotype can be detected following contact of a plant (or plant cell, or tissue or explant) with the putative modulator, e.g., by modulation of expression or activity of a polynucleotide or polypeptide of the invention. Modulation of expression or activity of a polynucleotide or polypeptide of the invention may also be caused by molecular elements in a signal transduction second messenger pathway and such modulation can affect similar elements in the same or another signal transduction second messenger pathway.

[0152] Subsequences. Also contemplated are uses of polynucleotides, also referred to herein as oligonucleotides, typically having at least 12 bases, preferably at least 15, more preferably at least 20, 30, or 50 bases, which hybridize under at least highly stringent (or ultra-high stringent or ultra-ultra-high stringent conditions) conditions to a polynucleotide sequence described above. The polynucleotides may be used as probes, primers, sense and antisense agents, and the like, according to methods as noted supra.

[0153] Subsequences of the polynucleotides of the invention, including polynucleotide fragments and oligonucleotides are useful as nucleic acid probes and primers. An oligonucleotide suitable for use as a probe or primer is at least about 15 nucleotides in length, more often at least about 18 nucleotides, often at least about 21 nucleotides, frequently at least about 30 nucleotides, or about 40 nucleotides, or more in length. A nucleic acid probe is useful in hybridization protocols, e.g., to identify additional polypeptide homologues of the invention, including protocols for microarray experiments. Primers can be annealed to a complementary target DNA strand by nucleic acid hybridization to form a hybrid between the primer and the target DNA strand, and then extended along the target DNA strand by a DNA polymerase enzyme. Primer pairs can be used for amplification of a nucleic acid sequence, e.g., by the polymerase chain reaction (PCR) or other nucleic-acid amplification methods. See Sambrook and Ausubel, supra.

[0154] In addition, the invention includes an isolated or recombinant polypeptide including a subsequence of at least about 15 contiguous amino acids encoded by the recombinant or isolated polynucleotides of the invention. For example, such polypeptides, or domains or fragments thereof, can be used as immunogens, e.g., to produce antibodies specific for the polypeptide sequence, or as probes for detecting a sequence of interest. A subsequence can range in size from about 15 amino acids in length up to and including the full length of the polypeptide.

[0155] To be encompassed by the present invention, an expressed polypeptide which comprises such a polypeptide subsequence performs at least one biological function of the intact polypeptide in substantially the same manner, or to a similar extent, as does the intact polypeptide. For example, a polypeptide fragment can comprise a recognizable structural motif or functional domain such as a DNA binding domain that binds to a specific DNA promoter region, an activation domain or a domain for protein-protein interactions.

### Production of Transgenic Plants

[0156] Modification of Traits. The polynucleotides of the invention are favorably employed to produce transgenic plants with various traits, or characteristics, that have been modified in a desirable manner, e.g., to improve the seed characteristics of a plant. For example, alteration of expression levels or patterns (e.g., spatial or temporal expression patterns) of one or more of the transcription factors (or transcription factor homologues) of the invention, as compared with the levels of the same protein found in a wild type plant, can be used to modify a plant's traits. An illustrative example of trait modification, improved characteristics, by altering expression levels of a particular transcription factor is described further in the Examples and the Sequence Listing.

[0157] Arabidopsis as a model system. Arabidopsis thaliana is the object of rapidly growing attention as a model for genetics and metabolism in plants. Arabidopsis has a small genome, and well documented studies are available. It is easy to grow in large numbers and mutants defining important genetically controlled mechanisms are either available, or can readily be obtained. Various methods to introduce and express isolated homologous genes are available (see Koncz, et al., eds. Methods in Arabidopsis Research. et al. (1992), World Scientific, New Jersey, N.J., in “Preface”). Because of its small size, short life cycle, obligate autogamy and high fertility, Arabidopsis is also a choice organism for the isolation of mutants and studies in morphogenetic and development pathways, and control of these pathways by transcription factors (Koncz, supra, p. 72). A number of studies introducing transcription factors into A. thaliana have demonstrated the utility of this plant for understanding the mechanisms of gene regulation and trait alteration in plants. See, for example, Koncz, supra, and U.S. Pat. No. 6,417,428).

[0158] Arabidopsis genes in transgenic plants. Expression of genes which encode transcription factors modify expression of endogenous genes, polynucleotides, and proteins are well known in the art. In addition, transgenic plants comprising isolated polynucleotides encoding transcription factors may also modify expression of endogenous genes, polynucleotides, and proteins. Examples include Peng et al. (1997, Genes and Development 11:3194-3205) and Peng et al. (1999, Nature, 400:256-261). In addition, many others have demonstrated that an Arabidopsis transcription factor expressed in an exogenous plant species elicits the same or very similar phenotypic response. See, for example, Fu et al. (2001, Plant Cell 13:1791-1802); Nandi et al. (2000, Curr. Biol. 10:215-218); Coupland (1995, Nature 377:482-483); and Weigel and Nilsson (1995, Nature 377:482-500).

[0159] Homologous genes introduced into transgenic plants. Homologous genes that may be derived from any plant, or from any source whether natural, synthetic, semi-synthetic or recombinant, and that share significant sequence identity or similarity to those provided by the present invention, may be introduced into plants, for example, crop plants, to confer desirable or improved traits. Consequently, transgenic plants may be produced that comprise a recombinant expression vector or cassette with a promoter operably linked to one or more sequences homologous to presently disclosed sequences. The promoter may be, for example, a plant or viral promoter.

[0160] The invention thus provides for methods for preparing transgenic plants, and for modifying plant traits. These methods include introducing into a plant a recombinant expression vector or cassette comprising a functional promoter operably linked to one or more sequences homologous to presently disclosed sequences. Plants and kits for producing these plants that result from the application of these methods are also encompassed by the present invention.

[0161] Traits of interest. Examples of some of the traits that may be desirable in plants, and that may be provided by transforming the plants with the presently disclosed sequences, are listed in Table 6.

TABLE 6
Genes, traits and utilities that affect plant characteristics

| | | Transcription factor genes | Utility |
|---|---|---|---|
| Trait Category | Traits | that impact traits | Gene effect on: |
| Resistance and | Salt stress resistance | G22; G196; G226; G303; G312; | Germination rate, |
| tolerance | | G325; G353; G482; G545; G801; | survivability, yield; |
| | | G867; G884; G922; G926; G1452; | extended growth |
| | | G1794; G1820; G1836; G1843; | range |
| | | G1863; G2053; G2110; G2140; | |
| | | G2153; G2379; G2701; G2713; | |
| | | G2719; G2789 | |
| | Osmotic stress | G47; G175; G188; G303; G325; | Germination rate, |
| | resistance | G353; G489; G502; G526; G921; | survivability, yield |
| | | G922; G926; G1069; G1089; | |
| | | G1452; G1794; G1930; G2140; | |
| | | G2153; G2379; G2701; G2719; | |
| | | G2789; | |
| | Cold stress resistance; | G256; G394; G664; G864; G1322; | Germination, |
| | cold germination | G2130 | growth, earlier |
| | | | planting |
| | Tolerance to freezing | G303; G325; G353; G720; G912; | Survivability, yield, |
| | | G913; G1794; G2053; G2140; | appearance, |
| | | G2153; G2379; G2701; G2719; | extended range |
| | | G2789 | |
| | Heat stress resistance | G3; G464; G682; G864; G964; | Germination, |
| | | G1305; G1645; G2130 G2430 | growth, later |
| | | | planting |
| | Drought, low humidity | G303; G325; G353; G720; G912; | Survivability, yield, |
| | resistance | G926; G1452; G1794; G1820; | extended range |
| | | G1843; G2053; G2140; G2153; | |
| | | G2379; G2583; G2701; G2719; | |
| | | G2789 | |
| | Radiation resistance | G1052 | Survivability, vigor, |
| | | | appearance |
| | Decreased herbicide | G343; G2133; G2517 | Resistant to |
| | sensitivity | | increased herbicide |
| | | | use |
| | Increased herbicide | G374; G877; G1519 | Use as a herbicide |
| | sensitivity | | target |
| | Oxidative stress | G477; G789; G1807; G2133; | Improved yield, |
| | | G2517 | appearance, reduced |
| | | | senescence |
| | Light response | G183; G354; G375; G1062; | Germination, |
| | | G1322; G1331; G1488; G1494; | growth, |
| | | G1521; G1786; G1794; G2144; | development, |
| | | G2555; | flowering time |
| Development, | Overall plant | G24; G27; G31; G33; G47; G147; | Vascular tissues, |
| morphology | architecture | G156; G160; G182; G187; G195; | lignin content; cell |
| | | G196; G211; G221; G237; G280; | wall content; |
| | | G342; G352; G357; G358; G360; | appearance |
| | | G362; G364; G365; G367; G373; | |
| | | G377; G396; G431; G447; G479; | |
| | | G546; G546; G551; G578; G580; | |
| | | G596; G615; G617; G620; G625; | |
| | | G638; G658; G716; G725; G727; | |
| | | G730; G740; G770; G858; G865; | |
| | | G869; G872; G904; G910; G912; | |
| | | G920; G939; G963; G977; G979; | |
| | | G987; G988; G993; G1007; | |
| | | G1010; G1014; G1035; G1046; | |
| | | G1049; G1062; G1069; G1070; | |
| | | G1076; G1089; G1093; G1127; | |
| | | G1131; G1145; G1229; G1246; | |
| | | G1304; G1318; G1320; G1330; | |
| | | G1331; G1352; G1354; G1360; | |
| | | G1364; G1379; G1384; G1399; | |
| | | G1415; G1417; G1442; G1453; | |
| | | G1454; G1459; G1460; G1471; | |
| | | G1475; G1477; G1487; G1487; | |
| | | G1492; G1499; G1499; G1531; | |
| | | G1540; G1543; G1543; G1544; | |
| | | G1548; G1584; G1587; G1588; | |
| | | G1589; G1636; G1642; G1747; | |
| | | G1749; G1749; G1751; G1752; | |
| | | G1763; G1766; G1767; G1778; | |
| | | G1789; G1790; G1791; G1793; | |
| | | G1794; G1795; G1800; G1806; | |
| | | G1811; G1835; G1836; G1838; | |
| | | G1839; G1843; G1853; G1855; | |
| | | G1865; G1881; G1882; G1883; | |
| | | G1884; G1891; G1896; G1898; | |
| | | G1902; G1904; G1906; G1913; | |
| | | G1914; G1925; G1929; G1930; | |
| | | G1954; G1958; G1965; G1976; | |
| | | G2057; G2107; G2133; G2134; | |
| | | G2151; G2154; G2157; G2181; | |
| | | G2290; G2299; G2340; G2340; | |
| | | G2346; G2373; G2376; G2424; | |
| | | G2465; G2505; G2509; G2512; | |
| | | G2513; G2519; G2520; G2533; | |
| | | G2534; G2573; G2589; G2687; | |
| | | G2720; G2787; G2789; G2893 | |
| | Size: increased stature | G189; G1073; G1435; G2430 | |
| | Size: reduced stature or | G3; G5; G21; G23; G39; G165; | Ornamental; small |
| | dwarfism | G184; G194; G258; G280; G340; | stature provides |
| | | G343; G353; G354; G362; G363; | wind resistance; |
| | | G370; G385; G396; G439; G440; | creation of dwarf |
| | | G447; G450; G550; G557; G599; | varieties |
| | | G636; G652; G670; G671; G674; | |
| | | G729; G760; G804; G831; G864; | |
| | | G884; G898; G900; G912; G913; | |
| | | G922; G932; G937; G939; G960; | |
| | | G962; G977; G991; G1000; | |
| | | G1008; G1020; G1023; G1053; | |
| | | G1067; G1075; G1137; G1181; | |
| | | G1198; G1228; G1266; G1267; | |
| | | G1275; G1277; G1309; G1311; | |
| | | G1314; G1317; G1322; G1323; | |
| | | G1326; G1332; G1334; G1367; | |
| | | G1381; G1382; G1386; G1421; | |
| | | G1488; G1494; G1537; G1545; | |
| | | G1560; G1586; G1641; G1652; | |
| | | G1655; G1671; G1750; G1756; | |
| | | G1757; G1782; G1786; G1794; | |
| | | G1839; G1845; G1879; G1886; | |
| | | G1888; G1933; G1939; G1943; | |
| | | G1944; G2011; G2094; G2115; | |
| | | G2130; G2132; G2144; G2145; | |
| | | G2147; G2156; G2294; G2313; | |
| | | G2344; G2431; G2510; G2517; | |
| | | G2521; G2893; G2893 | |
| | Fruit size and number | G362 | Biomass, yield, |
| | | | cotton boll fiber |
| | | | density |
| | Flower structure, | G47; G259; G353; G354; G671; | Ornamental |
| | inflorescence | G732; G988; G1000; G1063; | horticulture; |
| | | G1140; G1326; G1449; G1543; | production of |
| | | G1560; G1587; G1645; G1947; | saffron or other |
| | | G2108; G2143; G2893 | edible flowers |
| | Number and | G225; G226; G247; G362; G585; | Resistance to pests |
| | development of | G634; G676; G682; G1014; | and desiccation; |
| | trichomes | G1332; G1452; G1795; G2105 | essential oil |
| | | | production |
| | Seed size, color, and | G156; G450; G584; G652; G668; | Yield |
| | number | G858; G979; G1040; G1062; | |
| | | G1145; G1255; G1494; G1531; | |
| | | G1534; G1594; G2105; G2114; | |
| | Root development, | G9; G1482; G1534; G1794; | |
| | modifications | G1852; G2053; G2136; G2140 | |
| | Modifications to root | G225; G226 | Nutrient, water |
| | hairs | | uptake, pathogen |
| | | | resistance |
| | Apical dominance | G559; G732; G1255; G1275; | Ornamental |
| | | G1411; G1488; G1635; G2452; | horticulture |
| | | G2509 | |
| | Branching patterns | G568; G988; G1548 | Ornamental |
| | | | horticulture, knot |
| | | | reduction, improved |
| | | | windscreen |
| | Leaf shape, color, | G375; G377; G428; G438; G447; | Appealing shape or |
| | modifications | G464; G557; G577; G599; G635; | shiny leaves for |
| | | G671; G674; G736; G804; G903; | ornamental |
| | | G977; G921; G922; G1038; | agriculture, |
| | | G1063; G1067; G1073; G1075; | increased biomass |
| | | G1146; G1152; G1198; G1267; | or photosynthesis |
| | | G1269; G1452; G1484; G1586; | |
| | | G1594; G1767; G1786; G1792; | |
| | | G1886; G2059; G2094; G2105; | |
| | | G2113; G2117; G2143; G2144; | |
| | | G2431; G2452; G2465; G2587; | |
| | | G2583; G2724; | |
| | Silique | G1134 | Ornamental |
| | Stem morphology | G47; G438; G671; G748; G988; | Ornamental; |
| | | G1000 | digestibility |
| | Shoot modifications | G390; G391 | Ornamental stem |
| | | | bifurcations |
| Disease, Pathogen | Bacterial | G211; G347; G367; G418; G525; | Yield, appearance, |
| Resistance | | G545; G578; G1049 | survivability, |
| | | | extended range |
| | Fungal | G19; G28; G28; G28; G147; | Yield, appearance, |
| | | G188; G207; G211; G237; G248; | survivability, |
| | | G278; G347; G367; G371; G378; | extended range |
| | | G409; G477; G545; G545; G558; | |
| | | G569; G578; G591; G594; G616; | |
| | | G789; G805; G812; G865; G869; | |
| | | G872; G881; G896; G940; G1047; | |
| | | G1049; G1064; G1084; G1196; | |
| | | G1255; G1266; G1363; G1514; | |
| | | G1756; G1792; G1792; G1792; | |
| | | G1792; G1880; G1919; G1919; | |
| | | G1927; G1927; G1936; G1936; | |
| | | G1950; G2069; G2130; G2380; | |
| | | G2380; G2555 | |
| Nutrients | Increased tolerance to | G225; G226; G1792 | |
| | nitrogen-limited soils | | |
| | Increased tolerance to | G419; G545; G561; G1946 | |
| | phosphate-limited soils | | |
| | Increased tolerance to | G561; G911 | |
| | potassium-limited soils | | |
| Hormonal | Hormone sensitivity | G12; G546; G926; G760; G913; | Seed dormancy, |
| | | G926; G1062; G1069; G1095; | drought tolerance; |
| | | G1134; G1330; G1452; G1666; | plant form, fruit |
| | | G1820; G2140; G2789 | ripening |
| Seed biochemistry | Production of seed | G214; G259; G490; G652; G748; | Antioxidant activity, |
| | prenyl lipids, including | G883; G1052; G1328; G1930; | vitamin E |
| | tocopherol | G2509; G2520 | |
| | Production of seed | G20 | Precursors for |
| | sterols | | human steroid |
| | | | hormones; |
| | | | cholesterol |
| | | | modulators |
| | Production of seed | G353; G484; G674; G1272; | Defense against |
| | glucosinolates | G1506; G1897; G1946; G2113; | insects; putative |
| | | G2117; G2155; G2290; G2340 | anticancer activity; |
| | | | undesirable in |
| | | | animal feeds |
| | Modified seed oil | G162; G162; G180; G192; G241; | Vegetable oil |
| | content | G265; G286; G291; G427; G509; | production; |
| | | G519; G561; G567; G590; G818; | increased caloric |
| | | G849; G892; G961; G974; G1063; | value for animal |
| | | G1143; G1190; G1198; G1226; | feeds; lutein content |
| | | G1229; G1323; G1451; G1471; | |
| | | G1478; G1496; G1526; G1543; | |
| | | G1640; G1644; G1646; G1672; | |
| | | G1677; G1750; G1765; G1777; | |
| | | G1793; G1838; G1902; G1946; | |
| | | G1948; G2059; G2123; G2138; | |
| | | G2139; G2343; G2792; G2830 | |
| | Modified seed oil | G217; G504; G622; G778; G791; | Heat stability, |
| | composition | G861; G869; G938; G965; G1417; | digestibility of seed |
| | | G2192 | oils |
| | Modified seed protein | G162; G226; G241; G371; G427; | Reduced caloric |
| | content | G509; G567; G597; G732; G849; | value for humans |
| | | G865; G892; G963; G988; G1323; | |
| | | G1323; G1419; G1478; G1488; | |
| | | G1634; G1637; G1641; G1644; | |
| | | G1652; G1677; G1777; G1777; | |
| | | G1818; G1820; G1903; G1909; | |
| | | G1946; G1946; G1958; G2059; | |
| | | G2117; G2417; G2509 | |
| Leaf biochemistry | Production of flavonoids | G1666* | Ornamental pigment |
| | | | production; |
| | | | pathogen resistance; |
| | | | health benefits |
| | Production of leaf | G264; G353; G484; G652; G674; | Defense against |
| | glucosinolates | G681; G1069; G1198; G1322; | insects; putative |
| | | G1421; G1657; G1794; G1897; | anticancer activity; |
| | | G1946; G2115; G2117; G2144; | undesirable in |
| | | G2155; G2155; G2340; G2512; | animal feeds |
| | | G2520; G2552 | |
| | Production of diterpenes | G229 | Induction of |
| | | | enzymes involved in |
| | | | alkaloid |
| | | | biosynthesis |
| | Production of | G546 | Ornamental pigment |
| | anthocyanin | | |
| | Production of leaf | G561; G2131; G2424 | Precursors for |
| | phytosterols, inc. | | human steroid |
| | stigmastanol, | | hormones; |
| | campesterol | | cholesterol |
| | | | modulators |
| | Leaf fatty acid | G214; G377; G861; G962; G975; | Nutritional value; |
| | composition | G987; G1266; G1337; G1399; | increase in waxes |
| | | G1465; G1512; G2136; G2147; | for disease |
| | | G2192 | resistance |
| | Production of leaf | G214; G259; G280; G652; G987; | Antioxidant activity, |
| | prenyl lipids, including | G1543; G2509; G2520 | vitamin E |
| | tocopherol | | |
| Biochemistry, | Production of | G229; G663 | |
| general | miscellaneous | | |
| | secondary metabolites | | |
| | Sugar, starch, | G158; G211; G211; G237; G242; | Food digestibility, |
| | hemicellulose | G274; G598; G1012; G1266; | hemicellulose & |
| | composition, | G1309; G1309; G1641; G1765; | pectin content; fiber |
| | | G1865; G2094; G2094; G2589; | content; plant |
| | | G2589 | tensile strength, |
| | | | wood quality, |
| | | | pathogen resistance, |
| | | | pulp production; |
| | | | tuber starch content |
| Sugar sensing | Plant response to sugars | G26; G38; G43; G207; G218; | Photosynthetic rate, |
| | | G241; G254; G263; G308; G536; | carbohydrate |
| | | G567; G567; G680; G867; G912; | accumulation, |
| | | G956; G996; G1068; G1225; | biomass production, |
| | | G1314; G1314; G1337; G1759; | source-sink |
| | | G1804; G2153; G2379 | relationships, |
| | | | senescence |
| Growth, | Plant growth rate and | G447; G617; G674; G730; G917; | Faster growth, |
| Reproduction | development | G937; G1035; G1046; G1131; | increased biomass |
| | | G1425; G1452; G1459; G1492; | or yield, improved |
| | | G1589; G1652; G1879; G1943; | appearance; delay in |
| | | G2430; G2431; G2465; G2521 | bolting |
| | Embryo development | G167 | |
| | Seed germination rate | G979; G1792; G2130 | Yield |
| | Plant, seedling vigor | G561; G2346 | Survivability, yield |
| | Senescence; cell death | G571; G636; G878; G1050; | Yield, appearance; |
| | | G1463; G1749; G1944; G2130; | response to |
| | | G2155; G2340; G2383 | pathogens; |
| | Modified fertility | G39; G340; G439; G470; G559; | Prevents or |
| | | G615; G652; G671; G779; G962; | minimizes escape of |
| | | G977; G988; G1000; G1063; | the pollen of GMOs |
| | | G1067; G1075; G1266; G1311; | |
| | | G1321; G1326; G1367; G1386; | |
| | | G1421; G1453; G1471; G1453; | |
| | | G1560; G1594; G1635; G1750; | |
| | | G1947; G2011; G2094; G2113; | |
| | | G2115; G2130; G2143; G2147; | |
| | | G2294; G2510; G2893 | |
| | Early flowering | G147; G157; G180; G183; G183; | Faster generation |
| | | G184; G185; G208; G227; G294; | time; synchrony of |
| | | G390; G390; G390; G391; G391; | flowering; potential |
| | | G427; G427; G490; G565; G590; | for introducing new |
| | | G592; G720; G789; G865; G898; | traits to single |
| | | G898; G989; G989; G1037; | variety |
| | | G1037; G1142; G1225; G1225; | |
| | | G1226; G1242; G1305; G1305; | |
| | | G1380; G1380; G1480; G1480; | |
| | | G1488; G1494; G1545; G1545; | |
| | | G1649; G1706; G1760; G1767; | |
| | | G1767; G1820; G1841; G1841; | |
| | | G1842; G1843; G1843; G1946; | |
| | | G1946; G2010; G2030; G2030; | |
| | | G2144; G2144; G2295; G2295; | |
| | | G2347; G2348; G2348; G2373; | |
| | | G2373; G2509; G2509; G2555; | |
| | | G2555 | |
| | Delayed flowering | G8; G47; G192; G214; G234; | Delayed time to |
| | | G361; G362; G562; G568; G571; | pollen production of |
| | | G591; G680; G736; G748; G859; | GMO plants; |
| | | G878; G910; G912; G913; G971; | synchrony of |
| | | G994; G1051; G1052; G1073; | flowering; increased |
| | | G1079; G1335; G1435; G1452; | yield |
| | | G1478; G1789; G1804; G1865; | |
| | | G1865; G1895; G1900; G2007; | |
| | | G2133; G2155; G2291; G2465 | |
| | Extended flowering | G1947 | |
| | phase | | |
| | Flower and leaf | G259; G353; G377; G580; G638 | Ornamental |
| | development | G652; G858; G869; G917; G922; | applications; |
| | | G932; G1063; G1075; G1140; | decreased fertility |
| | | G1425; G1452; G1499; G1548; | |
| | | G1645; G1865; G1897; G1933; | |
| | | G2094; G2124; G2140; G2143; | |
| | | G2535; G2557 | |
| | Flower abscission | G1897 | Ornamental: longer |
| | | | retention of flowers |

When co-expressed with G669 and G663

[0162] Significance of modified plant traits. Currently, the existence of a series of maturity groups for different latitudes represents a major barrier to the introduction of new valuable traits. Any trait (e.g. disease resistance) has to be bred into each of the different maturity groups separately, a laborious and costly exercise. The availability of single strain, which could be grown at any latitude, would therefore greatly increase the potential for introducing new traits to crop species such as soybean and cotton.

[0163] For many of the traits, listed in Table 6 and below, that may be conferred to plants, a single transcription factor gene may be used to increase or decrease, advance or delay, or improve or prove deleterious to a given trait. For example, overexpression of a transcription factor gene that naturally occurs in a plant may cause early flowering relative to non-transformed or wild-type plants. By knocking out the gene, or suppressing the gene (with, for example, antisense suppression) the plant may experience delayed flowering. Similarly, overexpressing or suppressing one or more genes can impart significant differences in production of plant products, such as different fatty acid ratios. Thus, suppressing a gene that causes a plant to be more sensitive to cold may improve a plant's tolerance of cold.

[0164] Salt stress resistance. Soil salinity is one of the more important variables that determines where a plant may thrive. Salinity is especially important for the successful cultivation of crop plants, particular in many parts of the world that have naturally high soil salt concentrations, or where the soil has been over-utilized. Thus, presently disclosed transcription factor genes that provide increased salt tolerance during germination, the seedling stage, and throughout a plant's life cycle would find particular value for imparting survivability and yield in areas where a particular crop would not normally prosper.

[0165] Osmotic stress resistance. Presently disclosed transcription factor genes that confer resistance to osmotic stress may increase germination rate under adverse conditions, which could impact survivability and yield of seeds and plants.

[0166] Cold stress resistance. The potential utility of presently disclosed transcription factor genes that increase tolerance to cold is to confer better germination and growth in cold conditions. The germination of many crops is very sensitive to cold temperatures. Genes that would allow germination and seedling vigor in the cold would have highly significant utility in allowing seeds to be planted earlier in the season with a high rate of survivability. Transcription factor genes that confer better survivability in cooler climates allow a grower to move up planting time in the spring and extend the growing season further into autumn for higher crop yields.

[0167] Tolerance to freezing. The presently disclosed transcription factor genes that impart tolerance to freezing conditions are useful for enhancing the survivability and appearance of plants conditions or conditions that would otherwise cause extensive cellular damage. Thus, germination of seeds and survival may take place at temperatures significantly below that of the mean temperature required for germination of seeds and survival of non-transformed plants. As with salt tolerance, this has the added benefit of increasing the potential range of a crop plant into regions in which it would otherwise succumb. Cold tolerant transformed plants may also be planted earlier in the spring or later in autumn, with greater success than with non-transformed plants.

[0168] Heat stress tolerance. The germination of many crops is also sensitive to high temperatures. Presently disclosed transcription factor genes that provide increased heat tolerance are generally useful in producing plants that germinate and grow in hot conditions, may find particular use for crops that are planted late in the season, or extend the range of a plant by allowing growth in relatively hot climates.

[0169] Drought, low humidity tolerance. Strategies that allow plants to survive in low water conditions may include, for example, reduced surface area or surface oil or wax production. A number of presently disclosed transcription factor genes increase a plant's tolerance to low water conditions and provide the benefits of improved survivability, increased yield and an extended geographic and temporal planting range.

[0170] Radiation resistance. Presently disclosed transcription factor genes have been shown to increase lutein production. Lutein, like other xanthophylls such as zeaxanthin and violaxanthin, are important in the protection of plants against the damaging effects of excessive light. Lutein contributes, directly or indirectly, to the rapid rise of non-photochemical quenching in plants exposed to high light. Increased tolerance of field plants to visible and ultraviolet light impacts survivability and vigor, particularly for recent transplants. Also affected are the yield and appearance of harvested plants or plant parts. Crop plants engineered with presently disclosed transcription factor genes that cause the plant to produce higher levels of lutein therefore would have improved photoprotection, leading to less oxidative damage and increase vigor, survivability and higher yields under high light and ultraviolet light conditions.

[0171] Decreased herbicide sensitivity. Presently disclosed transcription factor genes that confer resistance or tolerance to herbicides (e.g., glyphosate) may find use in providing means to increase herbicide applications without detriment to desirable plants. This would allow for the increased use of a particular herbicide in a local environment, with the effect of increased detriment to undesirable species and less harm to transgenic, desirable cultivars.

[0172] Increased herbicide sensitivity. Knockouts of a number of the presently disclosed transcription factor genes have been shown to be lethal to developing embryos. Thus, these genes are potentially useful as herbicide targets.

[0173] Oxidative stress. In plants, as in all living things, abiotic and biotic stresses induce the formation of oxygen radicals, including superoxide and peroxide radicals. This has the effect of accelerating senescence, particularly in leaves, with the resulting loss of yield and adverse effect on appearance. Generally, plants that have the highest level of defense mechanisms, such as, for example, polyunsaturated moieties of membrane lipids, are most likely to thrive under conditions that introduce oxidative stress (e.g., high light, ozone, water deficit, particularly in combination). Introduction of the presently disclosed transcription factor genes that increase the level of oxidative stress defense mechanisms would provide beneficial effects on the yield and appearance of plants. One specific oxidizing agent, ozone, has been shown to cause significant foliar injury, which impacts yield and appearance of crop and ornamental plants. In addition to reduced foliar injury that would be found in ozone resistant plant created by transforming plants with some of the presently disclosed transcription factor genes, the latter have also been shown to have increased chlorophyll fluorescence (Yu-Sen Chang et al. Bot. Bull. Acad. Sin. (2001) 42: 265-272).

[0174] Heavy metal tolerance. Heavy metals such as lead, mercury, arsenic, chromium and others may have a significant adverse impact on plant respiration. Plants that have been transformed with presently disclosed transcription factor genes that confer improved resistance to heavy metals, through, for example, sequestering or reduced uptake of the metals will show improved vigor and yield in soils with relatively high concentrations of these elements. Conversely, transgenic transcription factors may also be introduced into plants to confer an increase in heavy metal uptake, which may benefit efforts to clean up contaminated soils.

[0175] Light response. Presently disclosed transcription factor genes that modify a plant's response to light may be useful for modifying a plant's growth or development, for example, photomorphogenesis in poor light, or accelerating flowering time in response to various light intensities, quality or duration to which a non-transformed plant would not similarly respond. Examples of such responses that have been demonstrated include leaf number and arrangement, and early flower bud appearances.

[0176] Overall plant architecture. Several presently disclosed transcription factor genes have been introduced into plants to alter numerous aspects of the plant's morphology. For example, it has been demonstrated that a number of transcription factors may be used to manipulate branching, such as the means to modify lateral branching, a possible application in the forestry industry. Transgenic plants have also been produced that have altered cell wall content, lignin production, flower organ number, or overall shape of the plants. Presently disclosed transcription factor genes transformed into plants may be used to affect plant morphology by increasing or decreasing internode distance, both of which may be advantageous under different circumstances. For example, for fast growth of woody plants to provide more biomass, or fewer knots, increased internode distances are generally desirable. For improved wind screening of shrubs or trees, or harvesting characteristics of, for example, members of the Gramineae family, decreased internode distance may be advantageous. These modifications would also prove useful in the ornamental horticulture industry for the creation of unique phenotypic characteristics of ornamental plants.

[0177] Increased stature. For some ornamental plants, the ability to provide larger varieties may be highly desirable. For many plants, including t fruit-bearing trees or trees and shrubs that serve as view or wind screens, increased stature provides obvious benefits. Crop species may also produce higher yields on larger cultivars.

[0178] Reduced stature or dwarfism. Presently disclosed transcription factor genes that decrease plant stature can be used to produce plants that are more resistant to damage by wind and rain, or more resistant to heat or low humidity or water deficit. Dwarf plants are also of significant interest to the ornamental horticulture industry, and particularly for home garden applications for which space availability may be limited.

[0179] Fruit size and number. Introduction of presently disclosed transcription factor genes that affect fruit size will have desirable impacts on fruit size and number, which may comprise increases in yield for fruit crops, or reduced fruit yield, such as when vegetative growth is preferred (e.g., with bushy ornamentals, or where fruit is undesirable, as with ornamental olive trees).

[0180] Flower structure, inflorescence, and development. Presently disclosed transgenic transcription factors have been used to create plants with larger flowers or arrangements of flowers that are distinct from wild-type or non-transformed cultivars. This would likely have the most value for the ornamental horticulture industry, where larger flowers or interesting presentations generally are preferred and command the highest prices. Flower structure may have advantageous effects on fertility, and could be used, for example, to decrease fertility by the absence, reduction or screening of reproductive components. One interesting application for manipulation of flower structure, for example, by introduced transcription factors could be in the increased production of edible flowers or flower parts, including saffron, which is derived from the stigmas of Crocus sativus.

[0181] Number and development of trichomes. Several presently disclosed transcription factor genes have been used to modify trichome number and amount of trichome products in plants. Trichome glands on the surface of many higher plants produce and secrete exudates that give protection from the elements and pests such as insects, microbes and herbivores. These exudates may physically immobilize insects and spores, may be insecticidal or ant-microbial or they may act as allergens or irritants to protect against herbivores. Trichomes have also been suggested to decrease transpiration by decreasing leaf surface air flow, and by exuding chemicals that protect the leaf from the sun.

[0182] Seed size, color and number. The introduction of presently disclosed transcription factor genes into plants that alter the size or number of seeds may have a significant impact on yield, both when the product is the seed itself, or when biomass of the vegetative portion of the plant is increased by reducing seed production. In the case of fruit products, it is often advantageous to modify a plant to have reduced size or number of seeds relative to non-transformed plants to provide seedless or varieties with reduced numbers or smaller seeds. Presently disclosed transcription factor genes have also been shown to affect seed size, including the development of larger seeds. Seed size, in addition to seed coat integrity, thickness and permeability, seed water content and by a number of other components including antioxidants and oligosaccharides, may affect seed longevity in storage. This would be an important utility when the seed of a plant is the harvested crops, as with, for example, peas, beans, nuts, etc. Presently disclosed transcription factor genes have also been used to modify seed color, which could provide added appeal to a seed product.

[0183] Root development, modifications. By modifying the structure or development of roots by transforming into a plant one or more of the presently disclosed transcription factor genes, plants may be produced that have the capacity to thrive in otherwise unproductive soils. For example, grape roots that extend further into rocky soils, or that remain viable in waterlogged soils, would increase the effective planting range of the crop. It may be advantageous to manipulate a plant to produce short roots, as when a soil in which the plant will be growing is occasionally flooded, or when pathogenic fungi or disease-causing nematodes are prevalent.

[0184] Modifications to root hairs. Presently disclosed transcription factor genes that increase root hair length or number potentially could be used to increase root growth or vigor, which might in turn allow better plant growth under adverse conditions such as limited nutrient or water availability.

[0185] Apical dominance. The modified expression of presently disclosed transcription factors that control apical dominance could be used in ornamental horticulture, for example, to modify plant architecture.

[0186] Branching patterns. Several presently disclosed transcription factor genes have been used to manipulate branching, which could provide benefits in the forestry industry. For example, reduction in the formation of lateral branches could reduce knot formation. Conversely, increasing the number of lateral branches could provide utility when a plant is used as a windscreen, or may also provide ornamental advantages.

[0187] Leaf shape, color and modifications. It has been demonstrated in laboratory experiments that overexpression of some of the presently disclosed transcription factors produced marked effects on leaf development. At early stages of growth, these transgenic seedlings developed narrow, upward pointing leaves with long petioles, possibly indicating a disruption in circadian-clock controlled processes or nyctinastic movements. Other transcription factor genes can be used to increase plant biomass; large size would be useful in crops where the vegetative portion of the plant is the marketable portion.

[0188] Siliques. Genes that later silique conformation in brassicates may be used to modify fruit ripening processes in brassicates and other plants, which may positively affect seed or fruit quality.

[0189] Stem morphology and shoot modifications. Laboratory studies have demonstrated that introducing several of the presently disclosed transcription factor genes into plants can cause stem bifurcations in shoots, in which the shoot meristems split to form two or three separate shoots. This unique appearance would be desirable in ornamental applications.

[0190] Diseases, pathogens and pests. A number of the presently disclosed transcription factor genes have been shown to or are likely to confer resistance to various plant diseases, pathogens and pests. The offending organisms include fungal pathogens Fusarium oxysporum, Botrytis cinerea, Sclerotinia sclerotiorum, and Erysiphe orontii. Bacterial pathogens to which resistance may be conferred include Pseudomonas syringae. Other problem organisms may potentially include nematodes, mollicutes, parasites, or herbivorous arthropods. In each case, one or more transformed transcription factor genes may provide some benefit to the plant to help prevent or overcome infestation. The mechanisms by which the transcription factors work could include increasing surface waxes or oils, surface thickness, local senescence, or the activation of signal transduction pathways that regulate plant defense in response to attacks by herbivorous pests (including, for example, protease inhibitors).

[0191] Increased tolerance of plants to nutrient-limited soils. Presently disclosed transcription factor genes introduced into plants may provide the means to improve uptake of essential nutrients, including nitrogenous compounds, phosphates, potassium, and trace minerals. The effect of these modifications is to increase the seedling germination and range of ornamental and crop plants. The utilities of presently disclosed transcription factor genes conferring tolerance to conditions of low nutrients also include cost savings to the grower by reducing the amounts of fertilizer needed, environmental benefits of reduced fertilizer runoff; and improved yield and stress tolerance. In addition, this gene could be used to alter seed protein amounts and/or composition that could impact yield as well as the nutritional value and production of various food products.

[0192] Hormone sensitivity. One or more of the presently disclosed transcription factor genes have been shown to affect plant abscisic acid (ABA) sensitivity. This plant hormone is likely the most important hormone in mediating the adaptation of a plant to stress. For example, ABA mediates conversion of apical meristems into dormant buds. In response to increasingly cold conditions, the newly developing leaves growing above the meristem become converted into stiff bud scales that closely wrap the meristem and protect it from mechanical damage during winter. ABA in the bud also enforces dormancy; during premature warm spells, the buds are inhibited from sprouting. Bud dormancy is eliminated after either a prolonged cold period of cold or a significant number of lengthening days. Thus, by affecting ABA sensitivity, introduced transcription factor genes may affect cold sensitivity and survivability. ABA is also important in protecting plants from drought tolerance.

[0193] Several other of the present transcription factor genes have been used to manipulate ethylene signal transduction and response pathways. These genes can thus be used to manipulate the processes influenced by ethylene, such as seed germination or fruit ripening, and to improve seed or fruit quality.

[0194] Production of seed and leaf prenyl lipids, including tocopherol. Prenyl lipids play a role in anchoring proteins in membranes or membranous organelles. Thus, modifying the prenyl lipid content of seeds and leaves could affect membrane integrity and function. A number of presently disclosed transcription factor genes have been shown to modify the tocopherol composition of plants. Tocopherols have both anti-oxidant and vitamin E activity.

[0195] Production of seed and leaf phytosterols: Presently disclosed transcription factor genes that modify levels of phytosterols in plants may have at least two utilities. First, phytosterols are an important source of precursors for the manufacture of human steroid hormones. Thus, regulation of transcription factor expression or activity could lead to elevated levels of important human steroid precursors for steroid semi-synthesis. For example, transcription factors that cause elevated levels of campesterol in leaves, or sitosterols and stigmasterols in seed crops, would be useful for this purpose. Phytosterols and their hydrogenated derivatives phytostanols also have proven cholesterol-lowering properties, and transcription factor genes that modify the expression of these compounds in plants would thus provide health benefits.

[0196] Production of seed and leaf glucosinolates. Some glucosinolates have anti-cancer activity; thus, increasing the levels or composition of these compounds by introducing several of the presently disclosed transcription factors might be of interest from a nutraceutical standpoint. (3) Glucosinolates form part of a plants natural defense against insects. Modification of glucosinolate composition or quantity could therefore afford increased protection from predators. Furthermore, in edible crops, tissue specific promoters might be used to ensure that these compounds accumulate specifically in tissues, such as the epidermis, which are not taken for consumption.

[0197] Modified seed oil content. The composition of seeds, particularly with respect to seed oil amounts and/or composition, is very important for the nutritional value and production of various food and feed products. Several of the presently disclosed transcription factor genes in seed lipid saturation that alter seed oil content could be used to improve the heat stability of oils or to improve the nutritional quality of seed oil, by, for example, reducing the number of calories in seed, increasing the number of calories in animal feeds, or altering the ratio of saturated to unsaturated lipids comprising the oils.

[0198] Seed and leaf fatty acid composition. A number of the presently disclosed transcription factor genes have been shown to alter the fatty acid composition in plants, and seeds in particular. This modification may find particular value for improving the nutritional value of, for example, seeds or whole plants. Dietary fatty acids ratios have been shown to have an effect on, for example, bone integrity and remodeling (see, for example, Weiler, H. A., Pediatr Res (2000) 47:5 692-697). The ratio of dietary fatty acids may alter the precursor pools of long-chain polyunsaturated fatty acids that serve as precursors for prostaglandin synthesis. In mammalian connective tissue, prostaglandins serve as important signals regulating the balance between resorption and formation in bone and cartilage. Thus dietary fatty acid ratios altered in seeds may affect the etiology and outcome of bone loss.

[0199] Modified seed protein content. As with seed oils, the composition of seeds, particularly with respect to protein amounts and/or composition, is very important for the nutritional value and production of various food and feed products. A number of the presently disclosed transcription factor genes modify the protein concentrations in seeds would provide nutritional benefits, and may be used to prolong storage, increase seed pest or disease resistance, or modify germination rates.

[0200] Production of flavonoids in leaves and other plant parts. Expression of presently disclosed transcription factor genes that increase flavonoid production in plants, including anthocyanins and condensed tannins, may be used to alter in pigment production for horticultural purposes, and possibly increasing stress resistance. Flavonoids have antimicrobial activity and could be used to engineer pathogen resistance. Several flavonoid compounds have health promoting effects such as the inhibition of tumor growth and cancer, prevention of bone loss and the prevention of the oxidation of lipids. Increasing levels of condensed tannins, whose biosynthetic pathway is shared with anthocyanin biosynthesis, in forage legumes is an important agronomic trait because they prevent pasture bloat by collapsing protein foams within the rumen. For a review on the utilities of flavonoids and their derivatives, refer to Dixon et al. (1999) Trends Plant Sci. 4:394-400.

[0201] Production of diterpenes in leaves and other plant parts. Depending on the plant species, varying amounts of diverse secondary biochemicals (often lipophilic terpenes) are produced and exuded or volatilized by trichomes. These exotic secondary biochemicals, which are relatively easy to extract because they are on the surface of the leaf, have been widely used in such products as flavors and aromas, drugs, pesticides and cosmetics. Thus, the overexpression of genes that are used to produce diterpenes in plants may be accomplished by introducing transcription factor genes that induce said overexpression. One class of secondary metabolites, the diterpenes, can effect several biological systems such as tumor progression, prostaglandin synthesis and tissue inflammation. In addition, diterpenes can act as insect pheromones, termite allomones, and can exhibit neurotoxic, cytotoxic and antimitotic activities. As a result of this functional diversity, diterpenes have been the target of research several pharmaceutical ventures. In most cases where the metabolic pathways are impossible to engineer, increasing trichome density or size on leaves may be the only way to increase plant productivity.

[0202] Production of anthocyanin in leaves and other plant parts. Several presently disclosed transcription factor genes can be used to alter anthocyanin production in numerous plant species. The potential utilities of these genes include alterations in pigment production for horticultural purposes, and possibly increasing stress resistance in combination with another transcription factor.

[0203] Production of miscellaneous secondary metabolites. Microarray data suggests that flux through the aromatic amino acid biosynthetic pathways and primary and secondary metabolite biosynthetic pathways are up-regulated. Presently disclosed transcription factors have been shown to be involved in regulating alkaloid biosynthesis, in part by up-regulating the enzymes indole-3-glycerol phosphatase and strictosidine synthase. Phenylalanine ammonia lyase, chalcone synthase and trans-cinnamate mono-oxygenase are also induced, and are involved in phenylpropenoid biosynthesis.

[0204] Sugar, starch, hemicellulose composition. Overexpression of the presently disclosed transcription factors that affect sugar content resulted in plants with altered leaf insoluble sugar content. Transcription factors that alter plant cell wall composition have several potential applications including altering food digestibility, plant tensile strength, wood quality, pathogen resistance and in pulp production. The potential utilities of a gene involved in glucose-specific sugar sensing are to alter energy balance, photosynthetic rate, carbohydrate accumulation, biomass production, source-sink relationships, and senescence.

[0205] Hemicellulose is not desirable in paper pulps because of its lack of strength compared with cellulose. Thus modulating the amounts of cellulose vs. hemicellulose in the plant cell wall is desirable for the paper/lumber industry. Increasing the insoluble carbohydrate content in various fruits, vegetables, and other edible consumer products will result in enhanced fiber content. Increased fiber content would not only provide health benefits in food products, but might also increase digestibility of forage crops. In addition, the hemicellulose and pectin content of fruits and berries affects the quality of jam and catsup made from them. Changes in hemicellulose and pectin content could result in a superior consumer product.

[0206] Plant response to sugars and sugar composition. In addition to their important role as an energy source and structural component of the plant cell, sugars are central regulatory molecules that control several aspects of plant physiology, metabolism and development. It is thought that this control is achieved by regulating gene expression and, in higher plants, sugars have been shown to repress or activate plant genes involved in many essential processes such as photosynthesis, glyoxylate metabolism, respiration, starch and sucrose synthesis and degradation, pathogen response, wounding response, cell cycle regulation, pigmentation, flowering and senescence. The mechanisms by which sugars control gene expression are not understood.

[0207] Because sugars are important signaling molecules, the ability to control either the concentration of a signaling sugar or how the plant perceives or responds to a signaling sugar could be used to control plant development, physiology or metabolism. For example, the flux of sucrose (a disaccharide sugar used for systemically transporting carbon and energy in most plants) has been shown to affect gene expression and alter storage compound accumulation in seeds. Manipulation of the sucrose signaling pathway in seeds may therefore cause seeds to have more protein, oil or carbohydrate, depending on the type of manipulation. Similarly, in tubers, sucrose is converted to starch which is used as an energy store. It is thought that sugar signaling pathways may partially determine the levels of starch synthesized in the tubers. The manipulation of sugar signaling in tubers could lead to tubers with a higher starch content.

[0208] Thus, the presently disclosed transcription factor genes that manipulate the sugar signal transduction pathway may lead to altered gene expression to produce plants with desirable traits. In particular, manipulation of sugar signal transduction pathways could be used to alter source-sink relationships in seeds, tubers, roots and other storage organs leading to increase in yield.

[0209] Plant growth rate and development. A number of the presently disclosed transcription factor genes have been shown to have significant effects on plant growth rate and development. These observations have included, for example, more rapid or delayed growth and development of reproductive organs. This would provide utility for regions with short or long growing seasons, respectively. Accelerating plant growth would also improve early yield or increase biomass at an earlier stage, when such is desirable (for example, in producing forestry products).

[0210] Embryo development. Presently disclosed transcription factor genes that alter embryo development has been used to alter seed protein and oil amounts and/or composition which is very important for the nutritional value and production of various food products. Seed shape and seed coat may also be altered by these genes, which may provide for improved storage stability.

[0211] Seed germination rate. A number of the presently disclosed transcription factor genes have been shown to modify seed germination rate, including when the seeds are in conditions normally unfavorable for germination (e.g., cold, heat or salt stress, or in the presence of ABA), and may thus be used to modify and improve germination rates under adverse conditions.

[0212] Plant, seedling vigor. Seedlings transformed with presently disclosed transcription factors have been shown to possess larger cotyledons and appeared somewhat more advanced than control plants. This indicates that the seedlings developed more rapidly that the control plants. Rapid seedling development is likely to reduce loss due to diseases particularly prevalent at the seedling stage (e.g., damping off) and is thus important for survivability of plants germinating in the field or in controlled environments.

[0213] Senescence, cell death. Presently disclosed transcription factor genes may be used to alter senescence responses in plants. Although leaf senescence is thought to be an evolutionary adaptation to recycle nutrients, the ability to control senescence in an agricultural setting has significant value. For example, a delay in leaf senescence in some maize hybrids is associated with a significant increase in yields and a delay of a few days in the senescence of soybean plants can have a large impact on yield. Delayed flower senescence may also generate plants that retain their blossoms longer and this may be of potential interest to the ornamental horticulture industry.

[0214] Modified fertility. Plants that overexpress a number of the presently disclosed transcription factor genes have been shown to possess reduced fertility. This could be a desirable trait, as it could be exploited to prevent or minimize the escape of the pollen of genetically modified organisms (GMOs) into the environment.

[0215] Early and delayed flowering. Presently disclosed transcription factor genes that accelerate flowering could have valuable applications in such programs since they allow much faster generation times. In a number of species, for example, broccoli, cauliflower, where the reproductive parts of the plants constitute the crop and the vegetative tissues are discarded, it would be advantageous to accelerate time to flowering. Accelerating flowering could shorten crop and tree breeding programs. Additionally, in some instances, a faster generation time might allow additional harvests of a crop to be made within a given growing season. A number of Arabidopsis genes have already been shown to accelerate flowering when constitutively expressed. These include LEAFY, APETALA1 and CONSTANS (Mandel, M. et al., 1995, Nature 377, 522-524; Weigel, D. and Nilsson, O., 1995, Nature 377, 495-500; Simon et al., 1996, Nature 384, 59-62).

[0216] By regulating the expression of potential flowering using inducible promoters, flowering could be triggered by application of an inducer chemical. This would allow flowering to be synchronized across a crop and facilitate more efficient harvesting. Such inducible systems could also be used to tune the flowering of crop varieties to different latitudes. At present, species such as soybean and cotton are available as a series of maturity groups that are suitable for different latitudes on the basis of their flowering time (which is governed by day-length). A system in which flowering could be chemically controlled would allow a single high-yielding northern maturity group to be grown at any latitude. In southern regions such plants could be grown for longer, thereby increasing yields, before flowering was induced. In more northern areas, the induction would be used to ensure that the crop flowers prior to the first winter frosts.

[0217] In a sizeable number of species, for example, root crops, where the vegetative parts of the plants constitute the crop and the reproductive tissues are discarded, it would be advantageous to delay or prevent flowering. Extending vegetative development with presently disclosed transcription factor genes could thus bring about large increases in yields. Prevention of flowering might help maximize vegetative yields and prevent escape of genetically modified organism (GMO) pollen.

[0218] Extended flowering phase. Presently disclosed transcription factors that extend flowering time have utility in engineering plants with longer-lasting flowers for the horticulture industry, and for extending the time in which the plant is fertile.

[0219] Flower and leaf development. Presently disclosed transcription factor genes have been used to modify the development of flowers and leaves. This could be advantageous in the development of new ornamental cultivars that present unique configurations. In addition, some of these genes have been shown to reduce a plant's fertility, which is also useful for helping to prevent development of pollen of GMOs.

[0220] Flower abscission. Presently disclosed transcription factor genes introduced into plants have been used to retain flowers for longer periods. This would provide a significant benefit to the ornamental industry, for both cut flowers and woody plant varieties (of, for example, maize), as well as have the potential to lengthen the fertile period of a plant, which could positively impact yield and breeding programs.

[0221] A listing of specific effects and utilities that the presently disclosed transcription factor genes have on plants, as determined by direct observation and assay analysis, is provided in Table 4.

[0222] Antisense and Co-suppression. In addition to expression of the nucleic acids of the invention as gene replacement or plant phenotype modification nucleic acids, the nucleic acids are also useful for sense and anti-sense suppression of expression, e.g., to down-regulate expression of a nucleic acid of the invention, e.g., as a further mechanism for modulating plant phenotype. That is, the nucleic acids of the invention, or subsequences or anti-sense sequences thereof, can be used to block expression of naturally occurring homologous nucleic acids. A variety of sense and anti-sense technologies are known in the art, e.g., as set forth in Lichtenstein and Nellen (1997) Antisense Technology: A Practical Approach IRL Press at Oxford University Press, Oxford, U.K. In general, sense or anti-sense sequences are introduced into a cell, where they are optionally amplified, e.g., by transcription. Such sequences include both simple oligonucleotide sequences and catalytic sequences such as ribozymes.

[0223] For example, a reduction or elimination of expression (i.e., a “knock-out”) of a transcription factor or transcription factor homologue polypeptide in a transgenic plant, e.g., to modify a plant trait, can be obtained by introducing an antisense construct corresponding to the polypeptide of interest as a cDNA. For antisense suppression, the transcription factor or homologue cDNA is arranged in reverse orientation (with respect to the coding sequence) relative to the promoter sequence in the expression vector. The introduced sequence need not be the full length cDNA or gene, and need not be identical to the cDNA or gene found in the plant type to be transformed. Typically, the antisense sequence need only be capable of hybridizing to the target gene or RNA of interest. Thus, where the introduced sequence is of shorter length, a higher degree of homology to the endogenous transcription factor sequence will be needed for effective antisense suppression. While antisense sequences of various lengths can be utilized, preferably, the introduced antisense sequence in the vector will be at least 30 nucleotides in length, and improved antisense suppression will typically be observed as the length of the antisense sequence increases. Preferably, the length of the antisense sequence in the vector will be greater than 100 nucleotides. Transcription of an antisense construct as described results in the production of RNA molecules that are the reverse complement of mRNA molecules transcribed from the endogenous transcription factor gene in the plant cell.

[0224] Suppression of endogenous transcription factor gene expression can also be achieved using a ribozyme. Ribozymes are RNA molecules that possess highly specific endoribonuclease activity. The production and use of ribozymes are disclosed in U.S. Pat. No. 4,987,071 and U.S. Pat. No. 5,543,508. Synthetic ribozyme sequences including antisense RNAs can be used to confer RNA cleaving activity on the antisense RNA, such that endogenous mRNA molecules that hybridize to the antisense RNA are cleaved, which in turn leads to an enhanced antisense inhibition of endogenous gene expression.

[0225] Vectors in which RNA encoded by a transcription factor or transcription factor homologue cDNA is over-expressed can also be used to obtain co-suppression of a corresponding endogenous gene, e.g., in the manner described in U.S. Pat. No. 5,231,020 to Jorgensen. Such co-suppression (also termed sense suppression) does not require that the entire transcription factor cDNA be introduced into the plant cells, nor does it require that the introduced sequence be exactly identical to the endogenous transcription factor gene of interest. However, as with antisense suppression, the suppressive efficiency will be enhanced as specificity of hybridization is increased, e.g., as the introduced sequence is lengthened, and/or as the sequence similarity between the introduced sequence and the endogenous transcription factor gene is increased.

[0226] Vectors expressing an untranslatable form of the transcription factor mRNA, e.g., sequences comprising one or more stop codon, or nonsense mutation) can also be used to suppress expression of an endogenous transcription factor, thereby reducing or eliminating its activity and modifying one or more traits. Methods for producing such constructs are described in U.S. Pat. No. 5,583,021. Preferably, such constructs are made by introducing a premature stop codon into the transcription factor gene. Alternatively, a plant trait can be modified by gene silencing using double-strand RNA (Sharp (1999) Genes and Development 13: 139-141). Another method for abolishing the expression of a gene is by insertion mutagenesis using the T-DNA of Agrobacterium tumefaciens. After generating the insertion mutants, the mutants can be screened to identify those containing the insertion in a transcription factor or transcription factor homologue gene. Plants containing a single transgene insertion event at the desired gene can be crossed to generate homozygous plants for the mutation. Such methods are well known to those of skill in the art. (See for example Koncz et al. (1992) Methods in Arabidopsis Research, World Scientific.)

[0227] Alternatively, a plant phenotype can be altered by eliminating an endogenous gene, such as a transcription factor or transcription factor homologue, e.g., by homologous recombination (Kempin et al. (1997) Nature 389:802-803).

[0228] A plant trait can also be modified by using the Cre-lox system (for example, as described in U.S. Pat. No. 5,658,772). A plant genome can be modified to include first and second lox sites that are then contacted with a Cre recombinase. If the lox sites are in the same orientation, the intervening DNA sequence between the two sites is excised. If the lox sites are in the opposite orientation, the intervening sequence is inverted.

[0229] The polynucleotides and polypeptides of this invention can also be expressed in a plant in the absence of an expression cassette by manipulating the activity or expression level of the endogenous gene by other means. For example, by ectopically expressing a gene by T-DNA activation tagging (Ichikawa et al. (1997) Nature 390 698-701; Kakimoto et al. (1996) Science 274: 982-985). This method entails transforming a plant with a gene tag containing multiple transcriptional enhancers and once the tag has inserted into the genome, expression of a flanking gene coding sequence becomes deregulated. In another example, the transcriptional machinery in a plant can be modified so as to increase transcription levels of a polynucleotide of the invention (See, e.g., PCT Publications WO 96/06166 and WO 98/53057 which describe the modification of the DNA-binding specificity of zinc finger proteins by changing particular amino acids in the DNA-binding motif).

[0230] The transgenic plant can also include the machinery necessary for expressing or altering the activity of a polypeptide encoded by an endogenous gene, for example by altering the phosphorylation state of the polypeptide to maintain it in an activated state.

[0231] Transgenic plants (or plant cells, or plant explants, or plant tissues) incorporating the polynucleotides of the invention and/or expressing the polypeptides of the invention can be produced by a variety of well established techniques as described above. Following construction of a vector, most typically an expression cassette, including a polynucleotide, e.g., encoding a transcription factor or transcription factor homologue, of the invention, standard techniques can be used to introduce the polynucleotide into a plant, a plant cell, a plant explant or a plant tissue of interest. Optionally, the plant cell, explant or tissue can be regenerated to produce a transgenic plant.

[0232] The plant can be any higher plant, including gymnosperms, monocotyledonous and dicotyledenous plants. Suitable protocols are available for Leguminosae (alfalfa, soybean, clover, etc.), Umbelliferae (carrot, celery, parsnip), Cruciferae (cabbage, radish, rapeseed, broccoli, etc.), Curcurbitaceae (melons and cucumber), Gramineae (wheat, corn, rice, barley, millet, etc.), Solanaceae (potato, tomato, tobacco, peppers, etc.), and various other crops. See protocols described in Ammirato et al. (1984) Handbook of Plant Cell Culture—Crop Species, Macmillan Publ. Co. Shimamoto et al. (1989) Nature 338:274-276; Fromm et al. (1990) Bio/Technology 8:833-839; and Vasil et al. (1990) Bio/Technology 8:429-434.

[0233] Transformation and regeneration of both monocotyledonous and dicotyledonous plant cells is now routine, and the selection of the most appropriate transformation technique will be determined by the practitioner. The choice of method will vary with the type of plant to be transformed; those skilled in the art will recognize the suitability of particular methods for given plant types. Suitable methods can include, but are not limited to: electroporation of plant protoplasts; liposome-mediated transformation; polyethylene glycol (PEG) mediated transformation; transformation using viruses; micro-injection of plant cells; micro-projectile bombardment of plant cells; vacuum infiltration; and Agrobacterium tumefaciens mediated transformation. Transformation means introducing a nucleotide sequence into a plant in a manner to cause stable or transient expression of the sequence.

[0234] Successful examples of the modification of plant characteristics by transformation with cloned sequences which serve to illustrate the current knowledge in this field of technology, and which are herein incorporated by reference, include: U.S. Pat. Nos. 5,571,706; 5,677,175; 5,510,471; 5,750,386; 5,597,945; 5,589,615; 5,750,871; 5,268,526; 5,780,708; 5,538,880; 5,773,269; 5,736,369 and 5,610,042.

[0235] Following transformation, plants are preferably selected using a dominant selectable marker incorporated into the transformation vector. Typically, such a marker will confer antibiotic or herbicide resistance on the transformed plants, and selection of transformants can be accomplished by exposing the plants to appropriate concentrations of the antibiotic or herbicide.

[0236] After transformed plants are selected and grown to maturity, those plants showing a modified trait are identified. The modified trait can be any of those traits described above. Additionally, to confirm that the modified trait is due to changes in expression levels or activity of the polypeptide or polynucleotide of the invention can be determined by analyzing mRNA expression using Northern blots, RT-PCR or microarrays, or protein expression using immunoblots or Western blots or gel shift assays.

[0237] Integrated Systems—Sequence Identity. Additionally, the present invention may be an integrated system, computer or computer readable medium that comprises an instruction set for determining the identity of one or more sequences in a database. In addition, the instruction set can be used to generate or identify sequences that meet any specified criteria. Furthermore, the instruction set may be used to associate or link certain functional benefits, such improved characteristics, with one or more identified sequence.

[0238] For example, the instruction set can include, e.g., a sequence comparison or other alignment program, e.g., an available program such as, for example, the Wisconsin Package Version 10.0, such as BLAST, FASTA, PILEUP, FINDPATTERNS or the like (GCG, Madison, Wis.). Public sequence databases such as GenBank, EMBL, Swiss-Prot and PIR or private sequence databases such as PHYTOSEQ sequence database (Incyte Genomics, Palo Alto, Calif.) can be searched.

[0239] Alignment of sequences for comparison can be conducted by the local homology algorithm of Smith and Waterman (1981) Adv. Appl. Math. 2:482, by the homology alignment algorithm of Needleman and Wunsch (1970) J. Mol. Biol. 48:443-453, by the search for similarity method of Pearson and Lipman (1988) Proc. Natl. Acad. Sci. U.S.A. 85:2444-2448, by computerized implementations of these algorithms. After alignment, sequence comparisons between two (or more) polynucleotides or polypeptides are typically performed by comparing sequences of the two sequences over a comparison window to identify and compare local regions of sequence similarity. The comparison window can be a segment of at least about 20 contiguous positions, usually about 50 to about 200, more usually about 100 to about 150 contiguous positions. A description of the method is provided in Ausubel et al., supra.

[0240] A variety of methods for determining sequence relationships can be used, including manual alignment and computer assisted sequence alignment and analysis. This later approach is a preferred approach in the present invention, due to the increased throughput afforded by computer assisted methods. As noted above, a variety of computer programs for performing sequence alignment are available, or can be produced by one of skill.

[0241] One example algorithm that is suitable for determining percent sequence identity and sequence similarity is the BLAST algorithm, which is described in Altschul et al. J. Mol. Biol. 215:403-410 (1990). Software for performing BLAST analyses is publicly available, e.g., through the National Center for Biotechnology Information (see internet website at ncbi.nlm.nih.gov). This algorithm involves first identifying high scoring sequence pairs (HSPs) by identifying short words of length W in the query sequence, which either match or satisfy some positive-valued threshold score T when aligned with a word of the same length in a database sequence. T is referred to as the neighborhood word score threshold (Altschul et al., supra). These initial neighborhood word hits act as seeds for initiating searches to find longer HSPs containing them. The word hits are then extended in both directions along each sequence for as far as the cumulative alignment score can be increased. Cumulative scores are calculated using, for nucleotide sequences, the parameters M (reward score for a pair of matching residues; always >0) and N (penalty score for mismatching residues; always <0). For amino acid sequences, a scoring matrix is used to calculate the cumulative score. Extension of the word hits in each direction are halted when: the cumulative alignment score falls off by the quantity X from its maximum achieved value; the cumulative score goes to zero or below, due to the accumulation of one or more negative-scoring residue alignments; or the end of either sequence is reached. The BLAST algorithm parameters W, T, and X determine the sensitivity and speed of the alignment. The BLASTN program (for nucleotide sequences) uses as defaults a wordlength (W) of 11, an expectation (E) of 10, a cutoff of 100, M=5, N=−4, and a comparison of both strands. For amino acid sequences, the BLASTP program uses as defaults a wordlength (W) of 3, an expectation (E) of 10, and the BLOSUM62 scoring matrix (see Henikoff & Henikoff (1989) Proc. Natl. Acad. Sci. USA 89:10915). Unless otherwise indicated, “sequence identity” here refers to the % sequence identity generated from a tblastx using the NCBI version of the algorithm at the default settings using gapped alignments with the filter “off” (see, for example, internet website at ncbi.nlm.nih.gov).

[0242] In addition to calculating percent sequence identity, the BLAST algorithm also performs a statistical analysis of the similarity between two sequences (see, e.g., Karlin & Altschul (1993) Proc. Natl. Acad. Sci. USA 90:5873-5787). One measure of similarity provided by the BLAST algorithm is the smallest sum probability (P(N)), which provides an indication of the probability by which a match between two nucleotide or amino acid sequences would occur by chance. For example, a nucleic acid is considered similar to a reference sequence (and, therefore, in this context, homologous) if the smallest sum probability in a comparison of the test nucleic acid to the reference nucleic acid is less than about 0.1, or less than about 0.01, and or even less than about 0.001. An additional example of a useful sequence alignment algorithm is PILEUP. PILEUP creates a multiple sequence alignment from a group of related sequences using progressive, pairwise alignments. The program can align, e.g., up to 300 sequences of a maximum length of 5,000 letters.

[0243] The integrated system, or computer typically includes a user input interface allowing a user to selectively view one or more sequence records corresponding to the one or more character strings, as well as an instruction set which aligns the one or more character strings with each other or with an additional character string to identify one or more region of sequence similarity. The system may include a link of one or more character strings with a particular phenotype or gene function. Typically, the system includes a user readable output element that displays an alignment produced by the alignment instruction set.

[0244] The methods of this invention can be implemented in a localized or distributed computing environment. In a distributed environment, the methods may implemented on a single computer comprising multiple processors or on a multiplicity of computers. The computers can be linked, e.g. through a common bus, but more preferably the computer(s) are nodes on a network. The network can be a generalized or a dedicated local or wide-area network and, in certain preferred embodiments, the computers may be components of an intra-net or an internet.

[0245] Thus, the invention provides methods for identifying a sequence similar or homologous to one or more polynucleotides as noted herein, or one or more target polypeptides encoded by the polynucleotides, or otherwise noted herein and may include linking or associating a given plant phenotype or gene function with a sequence. In the methods, a sequence database is provided (locally or across an inter or intra net) and a query is made against the sequence database using the relevant sequences herein and associated plant phenotypes or gene functions.

[0246] Any sequence herein can be entered into the database, before or after querying the database. This provides for both expansion of the database and, if done before the querying step, for insertion of control sequences into the database. The control sequences can be detected by the query to ensure the general integrity of both the database and the query. As noted, the query can be performed using a web browser based interface. For example, the database can be a centralized public database such as those noted herein, and the querying can be done from a remote terminal or computer across an internet or intranet.

### EXAMPLES

[0247] It is to be understood that this invention is not limited to the particular devices, machines, materials and methods described. Although particular embodiments are described, equivalent embodiments may be used to practice the invention.

[0248] The invention, now being generally described, will be more readily understood by reference to the following examples, which are included merely for purposes of illustration of certain aspects and embodiments of the present invention and are not intended to limit the invention. The complete descriptions of the traits associated with each polynucleotide of the invention is fully disclosed in Table 4 and Table 6. It will be recognized by one of skill in the art that a polypeptide that is associated with a particular first trait may also be associated with at least one other, unrelated and inherent second trait which was not predicted by the first trait.

### Example I

### Full Length Gene Identification and Cloning

[0249] Putative transcription factor sequences (genomic or ESTs) related to known transcription factors were identified in the Arabidopsis thaliana GenBank database using the tblastn sequence analysis program using default parameters and a P-value cutoff threshold of −4 or −5 or lower, depending on the length of the query sequence. Putative transcription factor sequence hits were then screened to identify those containing particular sequence strings. If the sequence hits contained such sequence strings, the sequences were confirmed as transcription factors.

[0250] Alternatively, Arabidopsis thaliana cDNA libraries derived from different tissues or treatments, or genomic libraries were screened to identify novel members of a transcription family using a low stringency hybridization approach. Probes were synthesized using gene specific primers in a standard PCR reaction (annealing temperature 60° C.) and labeled with ³²P dCTP using the High Prime DNA Labeling Kit (Boehringer Mannheim). Purified radiolabelled probes were added to filters immersed in Church hybridization medium (0.5 M NaPO₄ pH 7.0, 7% SDS, 1% w/v bovine serum albumin) and hybridized overnight at 60° C. with shaking. Filters were washed two times for 45 to 60 minutes with 1×SCC, 1% SDS at 60° C.

[0251] To identify additional sequence 5′ or 3′ of a partial cDNA sequence in a cDNA library, 5′ and 3′ rapid amplification of cDNA ends (RACE) was performed using the Marathon™ cDNA amplification kit (Clontech, Palo Alto, Calif.). Generally, the method entailed first isolating poly(A) mRNA, performing first and second strand cDNA synthesis to generate double stranded cDNA, blunting cDNA ends, followed by ligation of the Marathon™ Adaptor to the cDNA to form a library of adaptor-ligated ds cDNA.

[0252] Gene-specific primers were designed to be used along with adaptor specific primers for both 5′ and 3′ RACE reactions. Nested primers, rather than single primers, were used to increase PCR specificity. Using 5′ and 3′ RACE reactions, 5′ and 3′ RACE fragments were obtained, sequenced and cloned. The process can be repeated until 5′ and 3′ ends of the full-length gene were identified. Then the full-length cDNA was generated by PCR using primers specific to 5′ and 3′ ends of the gene by end-to-end PCR.

### Example II

### Construction of Expression Vectors

[0253] The sequence was amplified from a genomic or cDNA library using primers specific to sequences upstream and downstream of the coding region. The expression vector was pMEN20 or pMEN65, which are both derived from pMON316 (Sanders et al, (1987) Nucleic Acids Research 15:1543-1558) and contain the CaMV 35S promoter to express transgenes. To clone the sequence into the vector, both pMEN20 and the amplified DNA fragment were digested separately with SalI and NotI restriction enzymes at 37° C. for 2 hours. The digestion products were subject to electrophoresis in a 0.8% agarose gel and visualized by ethidium bromide staining. The DNA fragments containing the sequence and the linearized plasmid were excised and purified by using a Qiaquick gel extraction kit (Qiagen, Valencia Calif.). The fragments of interest were ligated at a ratio of 3:1 (vector to insert). Ligation reactions using T4 DNA ligase (New England Biolabs, Beverly Mass.) were carried out at 16° C. for 16 hours. The ligated DNAs were transformed into competent cells of the E. coli strain DHSalpha by using the heat shock method. The transformations were plated on LB plates containing 50 mg/l kanamycin (Sigma, St. Louis, Mo.). Individual colonies were grown overnight in five milliliters of LB broth containing 50 mg/l kanamycin at 37° C. Plasmid DNA was purified by using Qiaquick Mini Prep kits (Qiagen).

### Example III

### Transformation of Agrobacterium with the Expression Vector

[0254] After the expression constructs are generated, the constructs are used to transform Agrobacterium tumefaciens cells expressing the gene products. The stock of Agrobacterium tumefaciens cells for transformation is made as described by Nagel et al. (1990) FEMS Microbiol Letts. 67: 325-328. Agrobacterium strain ABI is grown in 250 ml LB medium (Sigma) overnight at 28° C. with shaking until an absorbance over 1 cm at 600 nm (A₆₀₀) of 0.5-1.0 is reached. Cells are harvested by centrifugation at 4,000×g for 15 min at 4° C. Cells are then resuspended in 250 μl chilled buffer (1 mM HEPES, pH adjusted to 7.0 with KOH). Cells are centrifuged again as described above and resuspended in 125 μl chilled buffer. Cells are then centrifuged and resuspended two more times in the same HEPES buffer as described above at a volume of 100 μl and 750 μl, respectively. Resuspended cells are then distributed into 40 μl aliquots, quickly frozen in liquid nitrogen, and stored at −80° C.

[0255] Agrobacterium cells are transformed with constructs prepared as described above following the protocol described by Nagel et al. (supra). For each DNA construct to be transformed, 50-100 ng DNA (generally resuspended in 10 mM Tris-HCl, 1 mM EDTA, pH 8.0) is mixed with 40 μl of Agrobacterium cells. The DNA/cell mixture is then transferred to a chilled cuvette with a 2 mm electrode gap and subject to a 2.5 kV charge dissipated at 25 μF and 200 μF using a Gene Pulser II apparatus (Bio-Rad, Hercules, Calif.). After electroporation, cells are immediately resuspended in 1.0 ml LB and allowed to recover without antibiotic selection for 2-4 hours at 28° C. in a shaking incubator. After recovery, cells are plated onto selective medium of LB broth containing 100 μg/ml spectinomycin (Sigma ChemCo., St. Louis, Mo.) and incubated for 24-48 hours at 28° C. Single colonies are then picked and inoculated in fresh medium. The presence of the plasmid construct is verified by PCR amplification and sequence analysis.

### Example IV

### Transformation of Arabidopsis Plants with Agrobacterium tumefaciens with Expression Vector

[0256] After transformation of Agrobacterium tumefaciens with plasmid vectors containing the gene, single Agrobacterium colonies were identified, propagated, and used to transform Arabidopsis plants. Briefly, 500 ml cultures of LB medium containing 50 mg/l kanamycin were inoculated with the colonies and grown at 28° C. with shaking for 2 days until an optical absorbance at 600 nm wavelength over 1 cm (A₆₀₀) of >2.0 is reached. Cells were then harvested by centrifugation at 4,000×g for 10 min, and resuspended in infiltration medium (½× Murashige and Skoog salts (Sigma), 1× Gamborg's B-5 vitamins (Sigma), 5.0% (w/v) sucrose (Sigma), 0.044 μM benzylamino purine (Sigma), 200 μl/l Silwet L-77 (Lehle Seeds) until an A₆₀₀ of 0.8 was reached.

[0257] Prior to transformation, Arabidopsis thaliana seeds (ecotype Columbia) were sown at a density of ˜10 plants per 4″ pot onto Pro-Mix BX potting medium (Hummert International) covered with fiberglass mesh (18 mm×16 mm) Plants were grown under continuous illumination (50-75 μE/m²/sec) at 22-23° C. with 65-70% relative humidity. After about 4 weeks, primary inflorescence stems (bolts) are cut off to encourage growth of multiple secondary bolts. After flowering of the mature secondary bolts, plants were prepared for transformation by removal of all siliques and opened flowers.

[0258] The pots were then immersed upside down in the mixture of Agrobacterium infiltration medium as described above for 30 sec, and placed on their sides to allow draining into a 1′×2′ flat surface covered with plastic wrap. After 24 h, the plastic wrap was removed and pots are turned upright. The immersion procedure was repeated one week later, for a total of two immersions per pot. Seeds were then collected from each transformation pot and analyzed following the protocol described below.

### Example V

### Identification of Arabidopsis Primary Transformants

[0259] Seeds collected from the transformation pots were sterilized essentially as follows. Seeds were dispersed into in a solution containing 0.1% (v/v) Triton X-100 (Sigma) and sterile H₂O and washed by shaking the suspension for 20 min. The wash solution was then drained and replaced with fresh wash solution to wash the seeds for 20 min with shaking. After removal of the second wash solution, a solution containing 0.1% (v/v) Triton X-100 and 70% ethanol (Equistar) was added to the seeds and the suspension was shaken for 5 min. After removal of the ethanol/detergent solution, a solution containing 0.1% (v/v) Triton X-100 and 30% (v/v) bleach (Clorox) was added to the seeds, and the suspension was shaken for 10 min. After removal of the bleach/detergent solution, seeds were then washed five times in sterile distilled H₂O. The seeds were stored in the last wash water at 4° C. for 2 days in the dark before being plated onto antibiotic selection medium (1× Murashige and Skoog salts (pH adjusted to 5.7 with 1M KOH), 1× Gamborg's B-5 vitamins, 0.9% phytagar (Life Technologies), and 50 mg/l kanamycin). Seeds were germinated under continuous illumination (50-75 μE/m²/sec) at 22-23° C. After 7-10 days of growth under these conditions, kanamycin resistant primary transformants (Tᵢ generation) were visible and obtained. These seedlings were transferred first to fresh selection plates where the seedlings continued to grow for 3-5 more days, and then to soil (Pro-Mix BX potting medium).

[0260] Primary transformants were crossed and progeny seeds (T₂) collected; kanamycin resistant seedlings were selected and analyzed. The expression levels of the recombinant polynucleotides in the transformants varies from about a 5% expression level increase to a least a 100% expression level increase. Similar observations are made with respect to polypeptide level expression.

### Example VI

### Identification of Arabidopsis Plants with Transcription Factor Gene Knockouts

[0261] The screening of insertion mutagenized Arabidopsis collections for null mutants in a known target gene was essentially as described in Krysan et al (1999) Plant Cell 11:2283-2290. Briefly, gene-specific primers, nested by 5-250 base pairs to each other, were designed from the 5′ and 3′ regions of a known target gene. Similarly, nested sets of primers were also created specific to each of the T-DNA or transposon ends (the “right” and “left” borders). All possible combinations of gene specific and T-DNA/transposon primers were used to detect by PCR an insertion event within or close to the target gene. The amplified DNA fragments were then sequenced which allows the precise determination of the T-DNA/transposon insertion point relative to the target gene. Insertion events within the coding or intervening sequence of the genes were deconvoluted from a pool comprising a plurality of insertion events to a single unique mutant plant for functional characterization. The method is described in more detail in Yu and Adam, U.S. application Ser. No. 09/177,733 filed Oct. 23, 1998.

### Example VII

### Identification of Modified Phenotypes in Overexpression or Gene Knockout Plants

[0262] Experiments were performed to identify those transformants or knockouts that exhibited modified biochemical characteristics. Among the biochemicals that were assayed were insoluble sugars, such as arabinose, fucose, galactose, mannose, rhamnose or xylose or the like; prenyl lipids, such as lutein, beta-carotene, xanthophyll-1, xanthophyll-2, chlorophylls A or B, or alpha-, delta- or gamma-tocopherol or the like; fatty acids, such as 16:0 (palmitic acid), 16:1 (palmitoleic acid), 18:0 (stearic acid), 18:1 (oleic acid), 18:2 (linoleic acid), 20:0, 18:3 (linolenic acid), 20:1 (eicosenoic acid), 20:2, 22:1 (erucic acid) or the like; waxes, such as by altering the levels of C29, C31, or C33 alkanes; sterols, such as brassicasterol, campesterol, stigmasterol, sitosterol or stigmastanol or the like, glucosinolates, protein or oil levels.

[0263] Fatty acids were measured using two methods depending on whether the tissue was from leaves or seeds. For leaves, lipids were extracted and esterified with hot methanolic H₂SO₄ and partitioned into hexane from methanolic brine. For seed fatty acids, seeds were pulverized and extracted in methanol:heptane:toluene:2,2-dimethoxypropane:H₂ SO₄ (39:34:20:5:2) for 90 minutes at 80° C. After cooling to room temperature the upper phase, containing the seed fatty acid esters, was subjected to GC analysis. Fatty acid esters from both seed and leaf tissues were analyzed with a Supelco SP-2330 column.

[0264] Glucosinolates were purified from seeds or leaves by first heating the tissue at 95° C. for 10 minutes. Preheated ethanol:water (50:50) is and after heating at 95° C. for a further 10 minutes, the extraction solvent is applied to a DEAE Sephadex column which had been previously equilibrated with 0.5 M pyridine acetate. Desulfoglucosinolates were eluted with 300 ul water and analyzed by reverse phase HPLC monitoring at 226 nm.

[0265] For wax alkanes, samples were extracted using an identical method as fatty acids and extracts were analyzed on a HP 5890 GC coupled with a 5973 MSD. Samples were chromatographically isolated on a J&W DB35 mass spectrometer (J&W Scientific).

[0266] To measure prenyl lipids levels, seeds or leaves were pulverized with 1 to 2% pyrogallol as an antioxidant. For seeds, extracted samples were filtered and a portion removed for tocopherol and carotenoid/chlorophyll analysis by HPLC. The remaining material was saponified for sterol determination. For leaves, an aliquot was removed and diluted with methanol and chlorophyll A, chlorophyll B, and total carotenoids measured by spectrophotometry by determining optical absorbance at 665.2 nm, 652.5 nm, and 470 nm. An aliquot was removed for tocopherol and carotenoid/chlorophyll composition by HPLC using a Waters uBondapak C18 column (4.6 mm×150 mm) The remaining methanolic solution was saponified with 10% KOH at 80° C. for one hour. The samples were cooled and diluted with a mixture of methanol and water. A solution of 2% methylene chloride in hexane was mixed in and the samples were centrifuged. The aqueous methanol phase was again re-extracted 2% methylene chloride in hexane and, after centrifugation, the two upper phases were combined and evaporated. 2% methylene chloride in hexane was added to the tubes and the samples were then extracted with one ml of water. The upper phase was removed, dried, and resuspended in 400 ul of 2% methylene chloride in hexane and analyzed by gas chromatography using a 50 m DB-5 ms (0.25 mm ID, 0.25 um phase, J&W Scientific).

[0267] Insoluble sugar levels were measured by the method essentially described by Reiter et al. (1999), Plant Journal 12:335-345. This method analyzes the neutral sugar composition of cell wall polymers found in Arabidopsis leaves. Soluble sugars were separated from sugar polymers by extracting leaves with hot 70% ethanol. The remaining residue containing the insoluble polysaccharides was then acid hydrolyzed with allose added as an internal standard. Sugar monomers generated by the hydrolysis were then reduced to the corresponding alditols by treatment with NaBH4, then were acetylated to generate the volatile alditol acetates which were then analyzed by GC-FID. Identity of the peaks was determined by comparing the retention times of known sugars converted to the corresponding alditol acetates with the retention times of peaks from wild-type plant extracts. Alditol acetates were analyzed on a Supelco SP-2330 capillary column (30 m×250 um×0.2 um) using a temperature program beginning at 180° C. for 2 minutes followed by an increase to 220° C. in 4 minutes. After holding at 220° C. for 10 minutes, the oven temperature is increased to 240° C. in 2 minutes and held at this temperature for 10 minutes and brought back to room temperature.

[0268] To identify plants with alterations in total seed oil or protein content, 150 mg of seeds from T2 progeny plants were subjected to analysis by Near Infrared Reflectance Spectroscopy (NIRS) using a Foss NirSystems Model 6500 with a spinning cup transport system. NIRS is a non-destructive analytical method used to determine seed oil and protein composition. Infrared is the region of the electromagnetic spectrum located after the visible region in the direction of longer wavelengths. ‘Near infrared’ owns its name for being the infrared region near to the visible region of the electromagnetic spectrum. For practical purposes, near infrared comprises wavelengths between 800 and 2500 nm. NIRS is applied to organic compounds rich in O—H bonds (such as moisture, carbohydrates, and fats), C—H bonds (such as organic compounds and petroleum derivatives), and N—H bonds (such as proteins and amino acids). The NIRS analytical instruments operate by statistically correlating NIRS signals at several wavelengths with the characteristic or property intended to be measured. All biological substances contain thousands of C—H, O—H, and N—H bonds. Therefore, the exposure to near infrared radiation of a biological sample, such as a seed, results in a complex spectrum which contains qualitative and quantitative information about the physical and chemical composition of that sample.

[0269] The numerical value of a specific analyte in the sample, such as protein content or oil content, is mediated by a calibration approach known as chemometrics. Chemometrics applies statistical methods such as multiple linear regression (MLR), partial least squares (PLS), and principle component analysis (PCA) to the spectral data and correlates them with a physical property or other factor, that property or factor is directly determined rather than the analyte concentration itself. The method first provides “wet chemistry” data of the samples required to develop the calibration.

[0270] Calibration for Arabidopsis seed oil composition was performed using accelerated solvent extraction using 1 g seed sample size and was validated against certified canola seed. A similar wet chemistry approach was performed for seed protein composition calibration.

[0271] Data obtained from NIRS analysis was analyzed statistically using a nearest-neighbor (N—N) analysis. The N—N analysis allows removal of within-block spatial variability in a fairly flexible fashion which does not require prior knowledge of the pattern of variability in the chamber. Ideally, all hybrids are grown under identical experimental conditions within a block (rep). In reality, even in many block designs, significant within-block variability exists. Nearest-neighbor procedures are based on assumption that environmental effect of a plot is closely related to that of its neighbors. Nearest-neighbor methods use information from adjacent plots to adjust for within-block heterogeneity and so provide more precise estimates of treatment means and differences. If there is within-plot heterogeneity on a spatial scale that is larger than a single plot and smaller than the entire block, then yields from adjacent plots will be positively correlated. Information from neighboring plots can be used to reduce or remove the unwanted effect of the spatial heterogeneity, and hence improve the estimate of the treatment effect. Data from neighboring plots can also be used to reduce the influence of competition between adjacent plots. The Papadakis N—N analysis can be used with designs to remove within-block variability that would not be removed with the standard split plot analysis (Papadakis, 1973, Inst. d'Amelior. Plantes Thessaloniki (Greece) Bull. Scientif, No. 23; Papadakis, 1984, Proc. Acad. Athens, 59, 326-342).

[0272] Experiments were performed to identify those transformants or knockouts that exhibited an improved pathogen tolerance. For such studies, the transformants were exposed to biotropic fungal pathogens, such as Erysiphe orontii, and necrotropic fungal pathogens, such as Fusarium oxysporum. Fusarium oxysporum isolates cause vascular wilts and damping off of various annual vegetables, perennials and weeds (Mauch-Mani and Slusarenko (1994) Molecular Plant-Microbe Interactions 7: 378-383). For Fusarium oxysporum experiments, plants grown on Petri dishes were sprayed with a fresh spore suspension of F. oxysporum. The spore suspension was prepared as follows: A plug of fungal hyphae from a plate culture was placed on a fresh potato dextrose agar plate and allowed to spread for one week. 5 ml sterile water was then added to the plate, swirled, and pipetted into 50 ml Armstrong Fusarium medium. Spores were grown overnight in Fusarium medium and then sprayed onto plants using a Preval paint sprayer. Plant tissue was harvested and frozen in liquid nitrogen 48 hours post infection.

[0273] Erysiphe orontii is a causal agent of powdery mildew. For Erysiphe orontii experiments, plants were grown approximately 4 weeks in a greenhouse under 12 hour light (20° C., ±30% relative humidity (rh)). Individual leaves were infected with E. orontii spores from infected plants using a camel's hair brush, and the plants were transferred to a Percival growth chamber (20° C., 80% rh.). Plant tissue was harvested and frozen in liquid nitrogen 7 days post infection.

[0274] Botrytis cinerea is a necrotrophic pathogen. Botrytis cinerea was grown on potato dextrose agar in the light. A spore culture was made by spreading 10 ml of sterile water on the fungus plate, swirling and transferring spores to 10 ml of sterile water. The spore inoculum (approx. 105 spores/ml) was used to spray 10 day-old seedlings grown under sterile conditions on MS (minus sucrose) media. Symptoms were evaluated every day up to approximately 1 week.

[0275] Infection with bacterial pathogens Pseudomonas syringae pv maculicola (Psm) strain 4326 and pv maculicola strain 4326 was performed by hand inoculation at two doses. Two inoculation doses allows the differentiation between plants with enhanced susceptibility and plants with enhanced resistance to the pathogen. Plants were grown for 3 weeks in the greenhouse, then transferred to the growth chamber for the remainder of their growth. Psm ES4326 was hand inoculated with 1 ml syringe on 3 fully-expanded leaves per plant (4½ wk old), using at least 9 plants per overexpressing line at two inoculation doses, OD=0.005 and OD=0.0005. Disease scoring occurred at day 3 post-inoculation with pictures of the plants and leaves taken in parallel.

[0276] In some instances, expression patterns of the pathogen-induced genes (such as defense genes) was monitored by microarray experiments. cDNAs were generated by PCR and resuspended at a final concentration of ˜100 ng/ul in 3×SSC or 150 mM Na-phosphate (Eisen and Brown (1999) Methods Enzymol. 303:179-205). The cDNAs were spotted on microscope glass slides coated with polylysine. The prepared cDNAs were aliquoted into 384 well plates and spotted on the slides using an x-y-z gantry (OmniGrid) purchased from GeneMachines (Menlo Park, Calif.) outfitted with quill type pins purchased from Telechem International (Sunnyvale, Calif.). After spotting, the arrays were cured for a minimum of one week at room temperature, rehydrated and blocked following the protocol recommended by Eisen and Brown (1999; supra).

[0277] Sample total RNA (10 ug) samples were labeled using fluorescent Cy3 and Cy5 dyes. Labeled samples were resuspended in 4×SSC/0.03% SDS/4 ug salmon sperm DNA/2 ug tRNA/50 mM Na-pyrophosphate, heated for 95° C. for 2.5 minutes, spun down and placed on the array. The array was then covered with a glass coverslip and placed in a sealed chamber. The chamber was then kept in a water bath at 62° C. overnight. The arrays were washed as described in Eisen and Brown (1999) and scanned on a General Scanning 3000 laser scanner. The resulting files are subsequently quantified using Imagene, a software purchased from BioDiscovery (Los Angeles, Calif.).

[0278] Experiments were performed to identify those transformants or knockouts that exhibited an improved environmental stress tolerance. For such studies, the transformants were exposed to a variety of environmental stresses. Plants were exposed to chilling stress (6 hour exposure to 4-8° C.)., heat stress (6 hour exposure to 32-37° C.), high salt stress (6 hour exposure to 200 mM NaCl (or 150 mM NaCl if the latter is indicated below), dehydrwater deficit stress (168 hours after removing water from watering trays, or, alternatively, watering was withheld and pots were placed on absorbent paper for a period of 8-10 days to apply a drought treatment), hyperosmotic stress (6 hour exposure to 3 M mannitol, or tolerance to 150 mM NaCl and 9.4% sucrose), or nutrient limitation (nitrogen, phosphate, and potassium) (Nitrogen: all components of MS medium remained constant except N was reduced to 20 mg/l of NH₄NO₃, or Phosphate: All components of MS medium except KH₂PO₄, which was replaced by K₂SO₄, Potassium: All components of MS medium except removal of KNO₃ and KH₂PO₄, which were replaced by NaH₄PO₄).

[0279] Experiments were performed to identify those transformants or knockouts that exhibited a modified structure and development characteristics. For such studies, the transformants were observed by eye to identify novel structural or developmental characteristics associated with the ectopic expression of the polynucleotides or polypeptides of the invention.

[0280] Experiments were performed to identify those transformants or knockouts that exhibited modified sugar-sensing. For such studies, seeds from transformants were germinated on media containing 5% glucose or 9.4% sucrose which normally partially restrict hypocotyl elongation. Plants with altered sugar sensing may have either longer or shorter hypocotyls than normal plants when grown on this media. Additionally, other plant traits may be varied such as root mass.

[0281] Flowering time was measured by the number of rosette leaves present when a visible inflorescence of approximately 3 cm is apparent Rosette and total leaf number on the progeny stem are tightly correlated with the timing of flowering (Koornneef et al (1991) Mol. Gen. Genet. 229:57-66. The vernalization response was measured. For vernalization treatments, seeds were sown to MS agar plates, sealed with micropore tape, and placed in a 4° C. cold room with low light levels for 6-8 weeks. The plates were then transferred to the growth rooms alongside plates containing freshly sown non-vernalized controls. Rosette leaves were counted when a visible inflorescence of approximately 3 cm was apparent.

[0282] Modified phenotypes observed for particular overexpressor or knockout plants are provided in Table 4. For a particular overexpressor that shows a less beneficial characteristic, it may be more useful to select a plant with a decreased expression of the particular transcription factor. For a particular knockout that shows a less beneficial characteristic, it may be more useful to select a plant with an increased expression of the particular transcription factor.

[0283] The sequences of the Sequence Listing or those in Tables 4 or 5 or those disclosed here can be used to prepare transgenic plants and plants with altered traits. The specific transgenic plants listed below are produced from the sequences of the Sequence Listing, as noted. Table 4 provides exemplary polynucleotide and polypeptide sequences of the invention. Table 4 includes, from left to right for each sequence: the first column shows the polynucleotide SEQ ID NO; the second column shows the Mendel Gene ID No., GID; the third column shows the trait(s) resulting from the knock out or overexpression of the polynucleotide in the transgenic plant; the fourth column shows the category of the trait; the fifth column shows the transcription factor family to which the polynucleotide belongs; the sixth column (“Comment”), includes specific effects and utilities conferred by the polynucleotide of the first column; the seventh column shows the SEQ ID NO of the polypeptide encoded by the polynucleotide; and the eighth column shows the amino acid residue positions of the conserved domain in amino acid (AA) co-ordinates.

[0284] G720: The complete sequence of G720 (SEQ ID NO: 25); similar to a portion of APRR2, Arabidopsis pseudo-response regulator (APRR2; Makino et al. 2000 Plant Cell Physiol. 41:791-803) was determined A line homozygous for a T-DNA insertion in G720 and lines overexpressing G720 under the 35S promoter were used to determine the function of this gene. The T-DNA insertion in G720 was approximately half-way into the coding sequence, just before the conserved domain, and therefore should result in a null mutation. G720 knockout mutants were slightly more sensitive to freezing than the wild-type controls when the seedlings were cold-acclimated prior to freezing. G720 overexpressing lines were slightly more tolerant to freezing. When seedlings were frozen at −10° C. for 20 hours, the G720 plants recovered slightly better compared to the wild-type control in two separate experiments. G720 was induced by ABA, salt, osmotic stress, drought, heat, and auxin. The combination of enhanced sensitivity to freezing in the knockout mutants, enhanced resistance in the overexpressing lines, and the induction pattern of G720 comprised strong evidence that G720 functions in regulation of dehydration tolerance, as freezing is a form of dehydration stress.

[0285] Plants overexpressing G720 also showed reduced time to flowering in the T1 generation. One third of the 35S::G720 T1 seedlings, from each of two separate batches, flowered markedly earlier (up to 1 week sooner, 24-hour light conditions) than controls plants. All of the T1 lines showed high levels of G720 overexpression (determined by RT-PCR). Three early flowering T1 plants were selected for further study. However, none of these lines flowered early in the T2, suggesting that activity of the transgene might have been reduced between the generations

Closely Related Genes from Other Species

[0286] G720 showed significant similarity to a drought-induced M. truncatula EST, GenBank accession number BG450227, that encodes a pseudo-receiver domain. The sequence similarity is high enough to suggest that the two proteins are orthologs, and the fact that G720 was also drought-induced is consistent with this hypothesis. Other ESTs from tomato and potato (BG642566, BG128919, BG129142, and BG887673) also showed high similarity to G720 and represent potential orthologs.

[0287] G1792: G1792 (SEQ ID NO: 45) was studied using transgenic plants in which the gene was expressed under the control of the 35S promoter. 35S::G1792 plants were more tolerant to the fungal pathogens Fusarium oxysporum and Botrytis cinerea and showed fewer symptoms after inoculation with a low dose of each pathogen. This result was confirmed using individual T2 lines. The effect of G1792 overexpression in increasing tolerance to pathogens received further, incidental confirmation. T2 plants of 35S::G1792 lines 5 and 12 had been growing in a room that suffered a serious powdery mildew infection. For each line, a pot of 6 plants was present in a flat containing 9 other pots of lines from unrelated genes. In either of the two different flats, the only plants that were free from infection were those from the 35S::G1792 line. This observation suggests that G1792 overexpression might increase resistance to powdery mildew. Additional experiments confirmed that 35S::G1792 plants showed increased tolerance to Erysiphe. G1792 was ubiquitously expressed, but appears to be induced by salicylic acid.

[0288] 35S::G1792 overexpressing plants also showed more tolerance to growth under nitrogen-limiting conditions. In a root growth assay under conditions of limiting N, 35S::G1792 lines were slightly less stunted. In a germination assay that monitors the effect of C on N signaling through anthocyanin production on high sucrose plus and minus glutamine the 35S::G1792 lines make less anthocyanin on high sucrose plus glutamine, suggesting that the gene can be involved in the plants ability to monitor their carbon and nitrogen status.

[0289] G1792 overexpressing plants showed several mild morphological alterations: leaves were dark green and shiny, and plants bolted, subsequently senesced, slightly later than wild-type controls. Among the T1 plants, additional morphological variation (not reproduced later in the T2 plants) was observed: many showed reductions in size as well as aberrations in leaf shape, phyllotaxy, and flower development.

Closely Related Genes from Other Species

[0290] G1792 shows sequence similarity, outside the conserved AP2 domain, with a portion of a predicted protein from tomato, represented by EST sequence AI776626 (AI776626 EST257726 tomato resistant, Cornell Lycopersicon esculentum cDNA clone cLER19A14, mRNA sequence).

[0291] G1756: G1756 (SEQ ID NO:175) was studied using transgenic plants in which the gene was expressed under the control of the 35S promoter. Overexpression of G1756 caused alterations in plant growth and development, reducing overall plant size and fertility. In addition, 35S::G1756 overexpressing lines show more disease symptoms following inoculation with a low dose of the fungal pathogen Botrytis cinerea compared to the wild-type controls. G1756 was ubiquitously expressed and transcript levels were altered by a variety of environmental or physiological conditions; G1756 expression can be induced by auxin, cold, and Fusarium.

Closely Related Genes from Other Species

[0292] G1756 shows some sequence similarity with known genes from other plant species within the conserved WRKY domain.

[0293] G481: Northern blot data from five different tissue samples indicates that G481 (SEQ ID NO: 113) was primarily expressed in flower and/or silique, and root tissue. G481 was analyzed through its ectopic overexpression in plants. G481 overexpressors were more tolerant to high sucrose in a germination assay. The phenotype of G481 was mild; however, there was a consistent difference in the hypocotyl and root elongation in the overexpressor plants compared to wild-type controls. Sucrose-sensing has been implicated in the regulation of source-sink relationships in plants. Consistent with the sugar sensing phenotype of the G481 overexpressors were the results from the biochemical analysis of G481 overexpressor plants suggesting that line 14 had higher amounts of seed oils and lower amounts of seed protein. This suggested that G481 was involved in the allocation of storage compounds to the seed. G481 overexpressor line 8 was darker green in the T2 generation which can mean a higher photosynthetic rate consistent with the possible role of G481 in sugar sensing.

Closely Related Genes from Other Species

[0294] There are several sequences from higher plants that show significant homology to G481 including, X59714 from corn, and two ESTs from tomato, AI486503 and AI782351.

[0295] G2133: G2133 (SEQ ID NO: 141) was studied using transgenic plants in which the gene was expressed under the control of the 35S promoter. Overexpression of G2133 caused a variety of alterations in plant growth and development: delayed flowering, altered inflorescence architecture, and a decrease in overall size and fertility. At early stages, 35S::G2133 transformants were markedly smaller than controls and displayed curled, dark-green leaves. Most of these plants remained in a vegetative phase of development substantially longer than controls, and produced an increased number of leaves before bolting. In the most severely affected plants, bolting occurred more than a month later than in wild type (24-hour light). In addition, the plants displayed a reduction in apical dominance and formed large numbers of shoots simultaneously, from the axils of rosette leaves. These inflorescence stems had short internodes, and carried increased numbers of cauline leaf nodes, giving them a very leafy appearance. The fertility of 35S::G2133 plants was generally very low. In addition, G2133 overexpressing lines were more resistant to the herbicide glyphosate. In a repeat experiment, lines 4 and 5 were more tolerant while line 2 was wild-type. G2133 expression was detected in a variety of tissues: flower, leaf, embryo, and silique samples. Its expression was altered by several conditions, including auxin treatment, osmotic stress, and Fusarium infection. G2133 can be used for the generation of glyphosate resistant plants, and to increase plant resistance to oxidative stress.

Closely Related Genes from Other Species

[0296] G2133 shows some sequence similarity with known genes from other plant species within the conserved AP2/EREBP domain.

[0297] G2517: G2517 (SEQ ID NO: 143) was studied using transgenic plants in which the gene was expressed under the control of the 35S promoter. Overexpression of G2517 caused alterations in plant growth and development: size variation was apparent in the 35S::G2517 T1 generation, with at least half the lines being very small. Additionally, 4/12 T1 plants formed flower buds marginally earlier than wild type. Three T1 lines (#8,11,12) were examined in the T2 generation, and all three T2 populations were slightly smaller than controls. In the physiological analysis of the T2 populations, G2517 overexpressing lines were more resistant to the herbicide glyphosate. G2517 can be used for the generation of glyphosate resistant plants, and to increase plant resistance to oxidative stress.

Closely Related Genes from Other Species

[0298] G2517 shows some sequence similarity with known genes from other plant species within the conserved WRKY domain.

[0299] G2140: The complete sequence of G2140 (SEQ ID NO: 81) was determined. G2140 was expressed throughout the plant. It showed repression by salicylic acid and Erysiphe infection. Overexpressing G2140 in Arabidopsis resulted in seedlings that were more tolerant to osmotic stress conditions. In germination assays where seedlings were exposed to high concentrations of sucrose or NaCl, all three lines tested showed better cotyledon expansion and seedling vigor. Additionally, G2140 overexpressing plants showed insensitivity to ABA in a germination assay. In general, G2140 overexpressing plants were small and sickly with short roots when grown in Petri plates. The combination of ABA insensitivity and resistance to osmotic stress at germination had also been observed for other genes, for example, G1820 (SEQ ID NO:13) and G926 (SEQ ID NO:111). Significantly, the ABA resistance was detected in a germination assay. ABA is involved in maintaining seed dormancy, and it is possible that ABA insensitivity at the germination stage promotes germination despite unfavorable conditions.

[0300] When grown in soil, G2140 overexpressing plants displayed marked changes in Arabidopsis leaf and root morphology. All twenty of the 35S::G2140 primary transformants displayed, to various extents, leaves with upcurled margins. In the most severe cases, the leaves became highly contorted and the plants were slightly small and grew more slowly than controls. Three T1 lines (#12, 15 and 16) that showed substantial levels of G2140 overexpression (determined by RT-PCR) were chosen for further study. The T2 seedlings from each of these lines exhibited stunted roots compared with controls. Seedlings from two of the lines (#15,16) also showed upcurled cotyledons. At later stages, however, T2-16 plants appeared wild type. Plants from the T2-12 and T2-15 populations were rather varied in size and showed hints of leaf curling later in development. However, this effect was less severe than that seen in the T1 lines. To verify the leaf-curling phenotype, two further T2 populations (#3,18) were morphologically examined; seedlings from T2-3 were extremely tiny with thickened hypocotyls and short stunted roots. Such plants were too small for transfer to soil. However, T2-18 plants showed slightly contorted cotyledons and formed severely upcurled leaves, confirming the effects seen in the T1 generation.

[0301] G2140 is useful for creating plants that germinate better under conditions of high salt. Evaporation from the soil surface causes upward water movement and salt accumulation in the upper soil layer where the seeds are placed. Thus, germination normally takes place at a salt concentration much higher than the mean salt concentration in the whole soil profile. Increased salt tolerance during the germination stage of a crop plant will impact survivability and yield. In addition, G2140 can be used to alter a plant's response to water deficit conditions and, therefore, can be used to engineer plants with enhanced tolerance to drought, and freezing.

Closely Related Genes from Other Species

[0302] G2140 proteins show extensive sequence similarity with a tomato ovary cDNA, TAMU Lycopersicon esculentum (AI488313) and a Glycine max cDNA clone (BE020519).

[0303] G1946: G1946 (SEQ ID NO:49) was studied using transgenic plants in which the gene was expressed under the control of the 35S promoter. Overexpression of G1946 resulted in accelerated flowering, with 35S::G1946 transformants producing flower buds up to a week earlier than wild-type controls (24-hour light conditions). These effects were seen in 12/20 primary transformants and in two independent plantings of each of the three T2 lines. Unlike many early flowering Arabidopsis transgenic lines, which are dwarfed, 35S::G1946 transformants often reached full-size at maturity, and produced large quantities of seeds, although the plants were slightly pale in coloration and had slightly flat leaves compared to wild-type. In addition, 35S::G1946 plants showed an altered response to phosphate deprivation. Seedlings of G 1946 overexpressors showed more secondary root growth on phosphate-free media, when compared to wild-type control. In a repeat experiment, all three lines showed the phenotype. Overexpression of G1946 in Arabidopsis also resulted in an increase in seed glucosinolate M39501 in T2 lines land 3. An increase in seed oil and a decrease in seed protein was also observed in these two lines. G1946 was ubiquitously expressed, and does not appear to be significantly induced or repressed by any of the biotic and abiotic stress conditions tested, with the exception of cold, which repressed G1946 expression. G1946 can be used to modify flowering time, as well as to improve the plant's performance in conditions of limited phosphate, and to alter seed oil, protein, and glucosinolate composition.

Closely Related Genes from Other Species

[0304] A comparison of the amino acid sequence of G1946 with sequences available from GenBank showed strong similarity with plant HSFs of several species (Lycopersicon peruvianum, Medicago truncatula, Lycopersicon esculentum, Glycine max, Solanum tuberosum, Oryza sativa and Hordeum vulgare subsp. Vulgare).

[0305] G1852: G1852 (SEQ ID NO:71) was analyzed through its ectopic overexpression in plants. Analysis of the endogenous level of G1852 transcripts by RT-PCR revealed expression in all tissues tested. G1852 expression was induced in response to ABA, heat and drought treatment. 35S::G1852 overexpressor plants were more tolerant to osmotic stress in a root growth assay on PEG (polyethylene glycol)-containing media compared with wild-type controls. Seedlings were slightly larger and have more root growth. G1852 can be used to alter a plant's response to water deficit conditions and therefore, be used to engineer plants with enhanced tolerance to drought, salt stress, and freezing.

Closely Related Genes from Other Species

[0306] A comparison of the amino acid sequence of G1852 with entries available from GenBank shows strong similarity with plant ankyrins of several species (Malus domestica, Solanum tuberosum, Oryza sativa, Gossypium arboreum, Medicago truncatula, Glycine max, Lycopersicon esculentum, Pinus taeda, Lotus japonicus and Gossypium hirsutum).

[0307] G325: G325 (SEQ ID NO:95) was analyzed using transgenic plants in which G325 was expressed under the control of the 35S promoter. G325 overexpressing plants showed more tolerance to osmotic stress in a germination assay in three separate experiments. They showed more seedling vigor than wild-type control when germinated on plates containing high salt and high sucrose. G325 was expressed at high levels in flowers and cauline leaves, and at lower levels in shoots, rosette leaves, and seedlings. G325 was induced by auxin, cold and heat stress. Expression of G325 was reduced in response to Fusarium infection or salicylic acid treatment. G325 can be useful for enhancing seed germination under high salt conditions or other conditions of osmotic stress. Evaporation from the soil surface causes upward water movement and salt accumulation in the upper soil layer where the seeds are placed. Thus, germination normally takes place at a salt concentration much higher than the mean salt concentration of in the whole soil profile. Increased salt tolerance during the germination stage of a crop plant will impact survivability and yield. G325 can also be used to engineer plants with enhanced tolerance to drought, salt stress, and freezing at later stages during growth and development.

Closely Related Genes from Other Species

[0308] G325 showed homology to non-Arabidopsis proteins within the conserved domain.

[0309] G2583: G2583 (SEQ ID NO: 17) was studied using transgenic plants in which the gene was expressed under the control of the 35S promoter. 35S::G2583 plants exhibited extremely glossy leaves. At early stages, 35S::G2583 seedlings appeared normal, but by about two weeks after sowing, the plants exhibited very striking shiny leaves, which were apparent until very late in development. Many lines displayed a variety of other effects such as a reduction in overall size, narrow curled leaves, or various non-specific floral abnormalities, which reduced fertility. These effects on leaf appearance were observed in 18/20 primary transformants, and in all the plants from 4/6 of the T2 lines (#2,4,9 and 15) examined. The glossy nature of the leaves from 35S::G2583 plants can be a consequence of changes in epicuticular wax content or composition. G2583 belongs to a small clade within the large AP2/EREBP Arabidopsis family that also contains G975 (SEQ ID NO: 19), G1387 (SEQ ID NO: 21), and G977 (SEQ ID NO: 23). Overexpression of G975 caused a substantial increase in leaf wax components, as well as morphological phenotypes resembling those observed in 35S::G2583 plants. G2583 was ubiquitously expressed, at higher levels in root, flower, embryo, and silique tissues. G2583 can be used to modify plant appearance (shiny leaves). In addition, it can be used to manipulate wax composition, amount, or distribution, which in turn can modify plant tolerance to drought and/or low humidity or resistance to insects.

Closely Related Genes from Other Species

[0310] G2583 showed some sequence similarity with known genes from other plant species within the conserved AP2/EREBP domain.

[0311] G1322: G1322 (SEQ ID NO: 21) was analyzed using transgenic plants in which the gene was expressed under the control of the 35S promoter. 35S::G1322 transgenic plants were wild-type in phenotype with respect to the biochemical analyses performed. Overexpression of G1322 produced changes in overall plant size and leaf development. At all stages, 35S::G1322 plants were distinctly smaller than controls and developed curled dark-green leaves. Following the switch to flowering, the plants formed relatively thin inflorescence stems and had a rather poor seed yield. In addition, overexpression of G1322 resulted in plants with an altered etiolation response as well as enhanced tolerance to germination under chilling conditions. When germinated in the dark, G1322 overexpressing transgenic plant lines had open, slightly green cotyledons. Under chilling conditions, all three transgenic lines displayed a similar germination response, seedlings were slightly larger and had longer roots. In addition, an increase in the leaf glucosinolate M39480 was observed in all three T2 lines. According to RT-PCR analysis, G1322 was expressed primarily in flower tissue. The utilities of G1322 include altering a plant's chilling sensitivity and altering a plant's light response. The germination of many crops is very sensitive to cold temperatures. A gene that will enhance germination and seedling vigor in the cold has tremendous utility in allowing seeds to be planted earlier in the season with a higher survival rate. G1322 can also be useful for altering leaf glucosinolate composition. Increases or decreases in specific glucosinolates or total glucosinolate content are desirable depending upon the particular application. Modification of glucosinolate composition or quantity can therefore afford increased protection from predators. Furthermore, in edible crops, tissue specific promoters can be used to ensure that these compounds accumulate specifically in tissues, such as the epidermis, which are not taken for consumption.

Closely Related Genes from Other Species

[0312] G1322 shows some sequence similarity with known genes from other plant species within the conserved Myb domain.

[0313] G303: The complete sequence of G303 (SEQ ID NO: 23) was determined G303 was detected at very low levels in roots and rosette leaves. G303 was analyzed using transgenic plants in which G303 was expressed under the control of the 35S promoter. G303 overexpressing plants showed more tolerance to osmotic stress in a germination assay in three separate experiments. They showed more seedling vigor than wild-type control when germinated on plates containing high salt and high sucrose. G303 are useful for enhancing seed germination under high salt conditions or other conditions of osmotic stress. Evaporation from the soil surface causes upward water movement and salt accumulation in the upper soil layer where the seeds are placed. Thus, germination normally takes place at a salt concentration much higher than the mean salt concentration in the whole soil profile. Increased salt tolerance during the germination stage of a crop plant will impact survivability and yield. G303 can also be used to engineer plants with enhanced tolerance to drought, salt stress, and freezing.

Closely Related Genes from Other Species

[0314] G303 shows some sequence similarity with known genes from other plant species within the conserved basic HLH domain.

[0315] G1927: G1927 (SEQ ID NO: 239) was analyzed using transgenic plants in which the gene was expressed under the control of the 35S promoter. Overexpression of G1927 in Arabidopsis resulted in plants that had an altered response to pathogen. Plants overexpressing G1927 showed fewer disease symptoms following infection with the fungal pathogen Sclerotinia sclerotiorum compared with control plants. The experiment was repeated on individual lines, and all three lines showed the enhanced pathogen tolerance phenotype. G1927 expression appeared to be ubiquitous according to RT-PCR analysis. G1927 can be used to manipulate the defense response in order to generate pathogen-resistant plants.

Closely Related Genes from Other Species

[0316] G1927 showed extensive sequence similarity to a NAC protein from tomato (BG350410).

[0317] G2153, SEQ ID NO: 83 and 84. The sequence of G2153 was obtained from Arabidopsis genomic sequencing project, GenBank accession number AC011437, based on its sequence similarity within the conserved domain to other AT-hook related proteins in Arabidopsis. G2153 corresponds to gene F7018.4 (AAF04888). To date, there is no published information regarding the functions of this gene.

[0318] The complete sequence of G2153 was determined at Mendel Biotechnology. G2153 is strongly expressed in roots, embryos, siliques, and germinating seed, but at low or undetectable levels in shoots, flowers, and rosette leaves. It is not significantly induced or repressed by any condition tested.

[0319] The function of this gene was analyzed using transgenic plants in which G2153 was expressed under the control of the 35S promoter. Lines for both direct fusion and two component constructs were generated. In the two-component system, two separate constructs were used, a 35S::LexA-GAL4TA and opLexA::TF (where TF encoded the G2153 polypeptide). The first of these (Promoter::LexA-GAL4TA) comprised a desired promoter cloned in front of a LexA DNA binding domain fused to a GAL4 activation domain. The construct vector backbone also carried a kanamycin resistance marker, along with an opLexA::GFP reporter. Transgenic lines were obtained containing the first component, and a “driver” line selected that shows reproducible expression of the in-cis reporter gene in the desired pattern through a number of generations. A homozygous population was established for that line, and the population was supertransformed with the second construct (opLexA::TF) carrying the transcription factor sequence of interest cloned behind a LexA operator site. This second construct vector backbone also contained a sulfonamide resistance marker.

[0320] The Arabidopsis plant lines from the direct fusion and two-component approaches exhibited similar effects, although small size was more likely to occur in lines produced with the two-component approach (two-component lines may have greater expression levels in comparison with direct fusion constructs, suggesting that the deleterious morphological effects may be dose-dependent). At least one T1 two-component line had greater biomass at later stages of growth than control plants. The T2 generations of three two-component Arabidopsis lines produced large rosettes relative to controls greater biomass at late stages of growth than control plants. A significant proportion of the 35S::G2153 direct fusion plant lines developed enlarged lateral organs (leaves and flowers), particularly at later developmental stages. The 35S::G2153 direct fusion plant lines generally produced greater biomass than controls at late stages.

[0321] Overexpression of G2153 in tomato plants using the two-component approach produced significantly larger tomato plants than control, non-transformed tomato plants.

[0322] Overexpression of G2153 in Arabidopsis resulted in seedlings with an altered response to hyperosmotic stress. In a germination assay on media containing high sucrose (9.4%), G2153 overexpressors had more expanded cotyledons and longer roots than wild-type controls. This phenotype was confirmed in repeat experiments on individual lines, and all three lines showed hyperosmotic tolerance. Increased tolerance to high sucrose could also be indicative of effects on sugar sensing.

[0323] Three different direct fusion lines also showed a strong performance relative to controls in soil-based water deficit assays with mature plants. G2153 overexpression under the regulatory control of the CaMV 35 S promoter also produced transgenic plants that had greater tolerance to NaCl (150 mM), later flowering, decreased sensitivity to abscisic acid, greater tolerance to cold, and greater tolerance to hyperosmotic stress relative to control plants.

[0324] Related sequences. A number of sequences derived from various diverse plant species were found to be phylogenetically-related to G2153. These include following orthologs and paralogs from Arabidopsis, rice, soy, and maize. Each of these related sequences contains an At-hook domain and a second conserved domain subsequence, the latter comprising a core sequence found within the larger DUF296 domain.

[0325] The At-hook transcription factors are DNA-binding proteins that are known to contain at least one AT-hook domain, a small DNA binding motif that bind to the minor groove of DNA (Aravind and Landsman (1998) Nucleic Acids Res. 26: 4413-4421, incorporated herein by reference).

[0326] The DUF 296 putative domain is “is found in proteins that contain AT-hook motifs pfam02178, which strongly suggests a DNA-binding function for the proteins as a whole, however the function of this domain is unknown” (The NCBI Conserved Domain Database; presently found at www.ncbi.nlm.nih.gov/sites/entrez?db=cdd).

[0327] A CLUSTALX (ver. 1.81)-derived multiple sequence alignment of the second conserved domains within the DUF296 domain appears below (SEQ ID NOs: appear in parentheses, asterisks indicate highly conserved residues, and colons show similar residues).

| | | |
|---|---|---|
| G2153 | (84) | GGAAVLALQGRFEILSLTGSFLPGP-APPGSTGLTIYLAGGQGQVV |
| G3456 | (248) | APGAVMALHGRFDILSLTGSFLPGP-SPPGATGLTIYLAGGQGQIV |
| G3401 | (250) | APSAVVALRGRFEILSLTGTFLPGP-APPGSTGLTVYLAGGQGQVV |
| G1069 | (64) | APGGVVSLQGRFEILSLTGAFLPGP-SPPGSTGLTVYLAGVQGQVV |
| G3556 | (272) | TGAAAVALRGRFEILSMSGAFLPAP-APPGATGLAVYLAGGQGQVV |
| G2157 | (270) | SGG-VVSLRGQFEILSMCGAFLPTSGSPAAAAGLTIYLAGAQGQVV |
| G3462 | (266) | APAGVITLHGRFEILSLSGAFLPSP-SPSGATGLTVYLAGGQGQVV |
| G596 | (258) | GGSSVVNLHGRFEILSLSGSFLPPP-APPAASGLTIYLAGGQGQVV |
| G2789 | (92) | PGGGVVSLHGRFEILSLSGSFLPPP-APPAASGLKVYLAGGQGQVI |
| G3457 | (260) | SPGAVVTLHGRFEILSLSGSFLPPP-APPAASGLAIYLAGGQGQVV |
| G3459 | (274) | AAGAVVTLHGRFEILSLSGSFLPPP-APPGATSLTIYLAGGQGQVV |
| G3460 | (258) | AAGAVVRLHGRFEILSLSGSFLPPP-APPGATSLTIYLAGGQGQVV |
| G3406 | (254) | PAGAVVSLHGRFEILSLSGSFLPPP-APPGATSLTIFLAGGQGQVV |
| G3407 | (262) | ASPAVATLHGRFEILSLAGSFLPPP-APPGATSLAAFLAGGQGQVV |
| G1667 | (280) | SSGAIVTLHGRYEILSLLGSILPPP-APLGITGLTIYLAGPQGQVV |
| G1067 | (256) | GGGGVVTLHGRFEILSLTGTVLPPP-APPGAGGLSIFLAGGQGQVV |
| G2156 | (264) | GTGGVVALHGRFEILSLTGTVLPPP-APPGSGGLSIFLSGVQGQVI |
| G3399 | (252) | PGSMVATLRGRFEILSLTGTVLPPP-APPGASGLTVFLSGGQGQVI |
| G3400 | (278) | PGSLVATMRGQFEILSLTGTVLPPP-APPSASGLTVFLSGGQGQVV |
| G1073 | (276) | AGGGVITLHGRFDILSLTGTALPPP-APPGAGGLTVYLAGGQGQVV |
| | | ::*:::***: *: ** . :* . .* :*:* ***:: |
| Consensus | (281) | GXXXILSXXGXXLP X₃₋₄ PXXXXXLXXXLXGXQGQ |

[0328] Alignments such as the above related subsequences may be used to identify relatedness within these domains. An alignment may suitably be determined by means of computer programs known in the art, such as CLUSTAL, or Accelrys Gene (Accelrys, Inc., San Diego, Calif.).

[0329] Some of the traits associated with overexpression of the transcription factors in plants containing the above subsequences may be found in US patent publication US20090138981A1, published May 28, 2009, herein incorporated by reference.

### Utilities

[0330] Overexpression of G2153 may be used to produce larger plants with greater biomass than control plants, which may have a significant positive impact on yield, for example, when the product is a plant organ, plant seed, or when the vegetative portion of the plant is harvested.

[0331] G2153 could be used to alter a plant's response to cold, salt, and water deficit conditions and could be used to engineer plants with enhanced tolerance to drought, salt stress, and cold or freezing.

[0332] G2153 may also be useful for altering a plant's response to sugars. In addition to their important role as an energy source and structural component of the plant cell, sugars are central regulatory molecules that control several aspects of plant physiology, metabolism and development. It is thought that this control is achieved by regulating gene expression and, in higher plants, sugars have been shown to repress or activate plant genes involved in many essential processes such as photosynthesis, gloxylate metabolism, respiration, starch and sucrose synthesis and degradation, pathogen response, wounding response, cell cycle regulation, pigmentation, flowering and senescence. The mechanisms by which sugars control gene expression are not understood.

[0333] Because sugars are important signaling molecules, the ability to control either the concentration of a signaling sugar or how the plant perceives or responds to a signaling sugar could be used to control plant development, physiology or metabolism. For example, the flux of sucrose (a disaccharide sugar used for systemically transporting carbon and energy in most plants) has been shown to affect gene expression and alter storage compound accumulation in seeds. Manipulation of the sucrose signaling pathway in seeds may therefore cause seeds to have more protein, oil or carbohydrate, depending on the type of manipulation. Similarly, in tubers, sucrose is converted to starch which is used as an energy store. It is thought that sugar signaling pathways may partially determine the levels of starch synthesized in the tubers. The manipulation of sugar signaling in tubers could lead to tubers with a higher starch content. Thus, manipulating the sugar signal transduction pathway may lead to altered gene expression to produce plants with desirable traits. In particular, manipulation of sugar signal transduction pathways could be used to alter source-sink relationships in seeds, tubors, roots and other storage organs leading to increase in yield.

### Example VIII

### Identification of Homologous Sequences

[0334] Homologous sequences from Arabidopsis and plant species other than Arabidopsis were identified using database sequence search tools, such as the Basic Local Alignment Search Tool (BLAST) (Altschul et al. (1990) J. Mol. Biol. 215:403-410; and Altschul et al. (1997) Nucl. Acid Res. 25: 3389-3402). The tblastx sequence analysis programs were employed using the BLOSUM-62 scoring matrix (Henikoff, S, and Henikoff, J. G. (1992) Proc. Natl. Acad. Sci. USA 89: 10915-10919).

[0335] Identified non-Arabidopsis sequences homologous to the Arabidopsis sequences are provided in Table 5. The percent sequence identity among these sequences can be as low as 47%, or even lower sequence identity. The entire NCBI GenBank database was filtered for sequences from all plants except Arabidopsis thaliana by selecting all entries in the NCBI GenBank database associated with NCBI taxonomic ID 33090 (Viridiplantae; all plants) and excluding entries associated with taxonomic ID 3701 (Arabidopsis thaliana). These sequences are compared to sequences representing genes of SEQ IDs NOs:2-2N, where N=2-123, using the Washington University TBLASTX algorithm (version 2.0a19MP) at the default settings using gapped alignments with the filter “off”. For each gene of SEQ IDs NOs:2-2N, where N=2-123, individual comparisons were ordered by probability score (P-value), where the score reflects the probability that a particular alignment occurred by chance. For example, a score of 3.6e-40 is 3.6×10⁻⁴⁰. In addition to P-values, comparisons were also scored by percentage identity. Percentage identity reflects the degree to which two segments of DNA or protein are identical over a particular length. Examples of sequences so identified are presented in Table 5. Homologous or orthologous sequences are readily identified and available in GenBank by Accession number (Table 5; Test sequence ID) The identified homologous polynucleotide and polypeptide sequences and homologues of the Arabidopsis polynucleotides and polypeptides may be orthologs of the Arabidopsis polynucleotides and polypeptides.

### Example IX

### Introduction of Polynucleotides into Dicotyledonous Plants

[0336] SEQ ID NOs: 1-(2N-1), wherein N=2-123, paralogous, orthologous, and homologous sequences recombined into pMEN20 or pMEN65 expression vectors are transformed into a plant for the purpose of modifying plant traits. The cloning vector may be introduced into a variety of cereal plants by means well-known in the art such as, for example, direct DNA transfer or Agrobacterium tumefaciens-mediated transformation. It is now routine to produce transgenic plants using most dicot plants (see Weissbach and Weissbach, (1989) supra; Gelvin et al., (1990) supra; Herrera-Estrella et al. (1983) supra; Bevan (1984) supra; and Klee (1985) supra). Methods for analysis of traits are routine in the art and examples are disclosed above.

### Example X

### Transformation of Cereal Plants with an Expression Vector

[0337] Cereal plants such as corn, wheat, rice, sorghum or barley, may also be transformed with the present polynucleotide sequences in pMEN20 or pMEN65 expression vectors for the purpose of modifying plant traits. For example, pMEN020 may be modified to replace the NptII coding region with the BAR gene of Streptomyces hygroscopicus that confers resistance to phosphinothricin. The KpnI and BglII sites of the Bar gene are removed by site-directed mutagenesis with silent codon changes.

[0338] The cloning vector may be introduced into a variety of cereal plants by means well-known in the art such as, for example, direct DNA transfer or Agrobacterium tumefaciens-mediated transformation. It is now routine to produce transgenic plants of most cereal crops (Vasil, I., Plant Molec. Biol. 25: 925-937 (1994)) such as corn, wheat, rice, sorghum (Cassas, A. et al., Proc. Natl. Acad Sci USA 90: 11212-11216 (1993) and barley (Wan, Y. and Lemeaux, P. Plant Physiol. 104:37-48 (1994). DNA transfer methods such as the microprojectile can be used for corn (Fromm. et al. Bio/Technology 8: 833-839 (1990); Gordon-Kamm et al. Plant Cell 2: 603-618 (1990); Ishida, Y., Nature Biotechnology 14:745-750 (1990)), wheat (Vasil, et al. Bio/Technology 10:667-674 (1992); Vasil et al., Bio/Technology 11:1553-1558 (1993); Weeks et al., Plant Physiol. 102:1077-1084 (1993)), rice (Christou Bio/Technology 9:957-962 (1991); Hiei et al. Plant J. 6:271-282 (1994); Aldemita and Hodges, Planta 199:612-617; Hiei et al., Plant Mol. Biol. 35:205-18 (1997)). For most cereal plants, embryogenic cells derived from immature scutellum tissues are the preferred cellular targets for transformation (Hiei et al., Plant Mol. Biol. 35:205-18 (1997); Vasil, Plant Molec. Biol. 25: 925-937 (1994)).

[0339] Vectors according to the present invention may be transformed into corn embryogenic cells derived from immature scutellar tissue by using microprojectile bombardment, with the A188XB73 genotype as the preferred genotype (Fromm, et al., Bio/Technology 8: 833-839 (1990); Gordon-Kamm et al., Plant Cell 2: 603-618 (1990)). After microprojectile bombardment the tissues are selected on phosphinothricin to identify the transgenic embryogenic cells (Gordon-Kamm et al., Plant Cell 2: 603-618 (1990)). Transgenic plants are regenerated by standard corn regeneration techniques (Fromm, et al., Bio/Technology 8: 833-839 (1990); Gordon-Kamm et al., Plant Cell 2: 603-618 (1990)).

[0340] The plasmids prepared as described above can also be used to produce transgenic wheat and rice plants (Christou, Bio/Technology 9:957-962 (1991); Hiei et al., Plant J. 6:271-282 (1994); Aldemita and Hodges, Planta 199:612-617 (1996); Hiei et al., Plant Mol. Biol. 35:205-18 (1997)) that coordinately express genes of interest by following standard transformation protocols known to those skilled in the art for rice and wheat Vasil, et al. Bio/Technology 10:667-674 (1992); Vasil et al., Bio/Technology 11:1553-1558 (1993); Weeks et al., Plant Physiol. 102:1077-1084 (1993)), where the bar gene is used as the selectable marker.

[0341] All references, publications, patent documents, web pages, and other documents cited or mentioned herein are hereby incorporated by reference in their entirety for all purposes. Although the invention has been described with reference to specific embodiments and examples, it should be understood that one of ordinary skill can make various modifications without departing from the spirit of the invention. The scope of the invention is not limited to the specific embodiments and examples provided.

TABLE 4

| Poly- | | | | | | Poly- | |
|---|---|---|---|---|---|---|---|
| nucleotide | | | | | | peptide | |
| SEQ ID | GID | | | | | SEQ ID | Conserved |
| NO: | No. | Trait | Category | Family | Comment | NO: | Domains |
| 1 | G1322 | Cold | Abiotic | MYB- | Increased seedling vigor | 2 | (26-130) |
| | | | stress | (R1) | | | |
| | | | | R2R3 | | | |
| 3 | G2130 | Cold; heat; | Abiotic | AP2 | Increased susceptibility to chilling; better | 4 | (93-160) |
| | | Botrytis | stress; | | germination in heat; increased susceptibilty | | |
| | | | disease | | to Botrytis | | |
| 5 | G256 | Cold | Abiotic | MYB- | Better germination and growth in cold | 6 | (13-115) |
| | | | stress | (R1) | | | |
| | | | | R2R3 | | | |
| 7 | G394 | Cold | Abiotic | HB | More sensitive to chilling. | 8 | (121-182) |
| | | | stress | | | | |
| 9 | G664 | Cold | Abiotic | MYB- | Better germination and growth in cold | 10 | (13-116) |
| | | | stress | (R1) | | | |
| | | | | R2R3 | | | |
| 11 | G864 | Cold; heat | Abiotic | AP2 | Adult stage chilling sensitivity; better | 12 | (119-186) |
| | | | stress | | germination in heat | | |
| 13 | G1820 | Drought; | Abiotic | CAAT | Increased tolerance to drought; better | 14 | (70-133) |
| | | osmotic; | stress; | | germination in high salt; reduced ABA | | |
| | | hormone | hormone | | sensitivity | | |
| | | sensitivity | sensitivity | | | | |
| 15 | G912 | Drought; | Abiotic | AP2 | Increased survival in drought condtions, | 16 | (51-118) |
| | | freezing | stress | | freezing tolerant | | |
| 17 | G2583 | Drought; low | Abiotic | AP2 | Tolerance to drought and/or low humidity; | 18 | (4-71) |
| | | humidity; insect | stress; | | resistance to insects | | |
| | | resistance | disease | | | | |
| 19 | G975 | Drought; low | Abiotic | AP2 | Tolerance to drought and/or low humidity; | 20 | (4-71) |
| | | humidity; insect | stress; | | resistance to insects | | |
| | | resistance | disease | | | | |
| 21 | G1322 | Drought; low | Abiotic | MYB- | Tolerance to drought and/or low humidity; | 22 | (26-130) |
| | | humidity; insect | stress; | (R1) | resistance to insects | | |
| | | resistance | disease | R2R3 | | | |
| 23 | G303 | Drought; low | Abiotic | HLH/ | Tolerance to drought and/or low humidity; | 24 | (92-161) |
| | | humidity; insect | stress; | MYC | resistance to insects | | |
| | | resistance | disease | | | | |
| 25 | G720 | Freezing | Abiotic | GARP | Knockout: increased susceptibility to | 26 | (301-349) |
| | | | stress | | freezing (knockout); overexpressor: | | |
| | | | | | slightly more freezing tolerant | | |
| 27 | G913 | Freezing | Abiotic | AP2 | Increased tolerance to freezing | 28 | (62-128) |
| | | | stress | | | | |
| 29 | G1305 | Heat | Abiotic | MYB- | Reduced chlorosis | 30 | (15-118) |
| | | | stress | (R1) | | | |
| | | | | R2R3 | | | |
| 31 | G1645 | Heat | Abiotic | MYB- | Reduced germination vigor | 32 | (90-210) |
| | | | stress | (R1) | | | |
| | | | | R2R3 | | | |
| 33 | G1841 | Heat | Abiotic | AP2 | Better germination under heat stress | 34 | (83-150) |
| | | | stress | | | | |
| 35 | G2430 | Heat | Abiotic | GARP | Increased tolerance | 36 | (425-478) |
| | | | stress | | | | |
| 37 | G3 | Heat | Abiotic | AP2 | More sensitive | 38 | (28-95) |
| | | | stress | | | | |
| 39 | G464 | Heat | Abiotic | IAA | Better germination and growth in heat | 40 | (20-28, 71-82, |
| | | | stress | | | | 126-142, 187-224) |
| 41 | G682 | Heat | Abiotic | MYB- | Better germination and growth in heat; increased | 42 | (27-63) |
| | | | stress | related | tolerance to nitrogen-limited medium; increased | | |
| | | | | | tolerance to 150 mM salt; increased tolerance | | |
| | | | | | to cold (8 C.) at germination and seedling stages; | | |
| | | | | | decreased sensitivity to abscisic acid: increased | | |
| | | | | | tolerance to 9.4% sucrose; increased root hairs; | | |
| | | | | | decreased leaf trichome density; increased | | |
| | | | | | tolerance to dehydration and/or water deficit | | |
| 43 | G964 | Heat | Abiotic | HB | Better germination and growth | 44 | (126-186) |
| | | | stress | | | | |
| 45 | G1792 | Nutrient uptake; | Abiotic | AP2 | Increased tolerance to nitrogen-limited medium; | 46 | (17-85) |
| | | Botrytis; Erysiphe; | stress; | | increased fungal disease resistance | | |
| | | Fusarium | disease | | | | |
| 47 | G1794 | Nutrient uptake; | Abiotic | AP2 | Reduced root growth; increased sensitivity to | 48 | (182-248) |
| | | osmotic | stress | | osmotic stress | | |
| 49 | G1946 | Nutrient uptake | Abiotic | HS | Increased root growth on phosphate-free media | 50 | (32-130) |
| | | | stress | | | | |
| 51 | G225 | Nutrient uptake | Abiotic | MYB- | Increased tolerance to nitrogen-limited medium; | 52 | (39-76) |
| | | | stress | related | increased root hairs; decreased leaf trichome | | |
| | | | | | density; | | |
| 53 | G226 | Nutrient uptake; | Abiotic | MYB- | Increased tolerance to nitrogen-limited medium; | 54 | (28-78) |
| | | sodium chloride | stress | related | increased tolerance to 150 mM salt; increased | | |
| | | | | | tolerance to cold (8 C.); decreased sensitivity to | | |
| | | | | | abscisic acid: increased tolerance to 9.4% sucrose; | | |
| | | | | | increased root hairs; decreased leaf trichome | | |
| | | | | | density; increased seed protein content | | |
| 55 | G419 | Nutrient uptake | Abiotic | HB | Increased tolerance to potassium-free medium | 56 | (392-452) |
| | | | stress | | | | |
| 57 | G545 | Nutrient uptake; | Abiotic | Z- | Increased tolerance to phosphate-free medium, high | 58 | (82-102, |
| | | sodium chloride; | stress; | C2H2 | salt; increased susceptibility to disease | | 136-154) |
| | | Erysiphe; | disease | | | | |
| | | Fusarium; | | | | | |
| | | Pseudomonas | | | | | |
| 59 | G561 | Nutrient uptake | Abiotic | bZIP | Increased tolerance to potassium-free medium | 60 | (248-308) |
| | | | stress | | | | |
| 61 | G911 | Nutrient uptake | Abiotic | RING/ | Increased growth on potassium-free medium | 62 | (86-129) |
| | | | stress | C3H2C3 | | | |
| 63 | G1069 | Osmotic; hormone | Abiotic | AT- | Better germination under osmotic stress; | 64 | (67-74) |
| | | sensitivity | stress; | hook | reduced ABA sensitivity | | |
| | | | hormone | | | | |
| | | | sensitivity | | | | |
| 65 | G1089 | Osmotic | Abiotic | BZIPT2 | Better germination under osmotic stress | 66 | (425-500) |
| | | | stress | | | | |
| 67 | G1452 | Osmotic; hormone | Abiotic | NAC | Better germination on sucrose and salt; | 68 | (30-177) |
| | | sensitivity | stress; | | reduced sensitivity to ABA | | |
| | | | hormone | | | | |
| | | | sensitivity | | | | |
| 69 | G175 | Osmotic | Abiotic | WRKY | Increased tolerance | 70 | (178-234, |
| | | | stress | | | | 372-428) |
| 71 | G1852 | Osmotic | Abiotic | AKR | Better root growth | 72 | (1-601) |
| | | | stress | | | | |
| 73 | G1863 | Osmotic | Abiotic | GRF- | Decreased germination under salt stress | 74 | (76-187) |
| | | | stress | like | | | |
| 75 | G188 | Osmotic; | Abiotic | WRKY | Better germination under osmotic stress; | 76 | (175-222) |
| | | Fusarium | stress; | | increased susceptibility | | |
| | | | disease | | | | |
| 77 | G1930 | Osmotic | Abiotic | AP2 | Better germination under osmotic stress | 78 | (59-124) |
| | | | stress | | | | |
| 79 | G2053 | Osmotic | Abiotic | NAC | Increased root growth | 80 | (10-149) |
| | | | stress | | | | |
| 81 | G2140 | Osmotic; hormone | Abiotic | HLH/ | Better germination on NaCl and sucrose; | 82 | (167-242) |
| | | sensitivity | stress | MYC | decreased sensitivity to ABA | | |
| | | | hormone | | | | |
| | | | sensitivity | | | | |
| 83 | G2153 | Osmotic | Abiotic | AT- | Greater tolerance to NaCl (150 mM); greater | 84 | (75-94, |
| | | | stress | hook | tolerance to sucrose (9.4%); greater tolerance to | | 162-206) |
| | | | | | water deficit (soil drought treatment); late | | DUF296: |
| | | | | | flowering; greater biomass; large flower; | | 107-232 |
| | | | | | decreased sensitivity to abscisic acid; greater | | |
| | | | | | tolerance to cold; greater tolerance to | | |
| | | | | | hyperosmotic stress | | |
| 85 | G2379 | Osmotic | Abiotic | TH | Increased seedling vigor on high sucrose media | 86 | (19-110, |
| | | | stress | | | | 173-232) |
| 87 | G2701 | Osmotic | Abiotic | MYB- | Better germination on high NaCl and sucrose | 88 | (33-81, |
| | | | stress | related | | | 129-183) |
| 89 | G2719 | Osmotic | Abiotic | MYB- | Increased seedling vigor on high sucrose | 90 | (56-154) |
| | | | stress | (R1) | | | |
| | | | | R2R3 | | | |
| 91 | G2789 | Osmotic; hormone | Abiotic | AT- | Better germination on high sucrose; reduced ABA | 92 | (53-73, |
| | | sensitivity | stress | hook | sensitivity | | 121-165) |
| | | | hormone | | | | |
| | | | sensitivity | | | | |
| 93 | G303 | Osmotic | Abiotic | HLH/ | Better germination on high sucrose and high NaCl | 94 | (92-161) |
| | | | stress | MYC | | | |
| 95 | G325 | Osmotic | Abiotic | Z-CO- | Slightly better germination on high sucrose | 96 | (5-28, |
| | | | stress | like | and high NaCl | | 48-71) |
| 97 | G353 | Osmotic | Abiotic | Z- | Increased seedling vigor on PEG | 98 | (41-61, |
| | | | stress | C2H2 | | | 84-104) |
| 99 | G47 | Osmotic | Abiotic | AP2 | Better root growth | 100 | (11-80) |
| | | | stress | | | | |
| 101 | G489 | Osmotic | Abiotic | CAAT | Increased tolerance to osmotic stress | 102 | (57-156) |
| | | | stress | | | | |
| 103 | G502 | Osmotic | Abiotic | NAC | Increased sensitivity to osmotic stress | 104 | (10-155) |
| | | | stress | | | | |
| 105 | G526 | Osmotic | Abiotic | NAC | Increased sensitivity to osmotic stress | 106 | (21-149) |
| | | | stress | | | | |
| 107 | G921 | Osmotic | Abiotic | WRKY | Increased sensitivity to osmotic stress | 108 | (146-203) |
| | | | stress | | | | |
| 109 | G922 | Osmotic; sodium | Abiotic | SCR | Better germination on high sucrose; better | 110 | (225-242) |
| | | chloride | stress | | germination and increased root growth on | | |
| | | | | | high salt | | |
| 111 | G926 | Osmotic; hormone | Abiotic | CAAT | Increased tolerance to osmotic stress | 112 | (131-225) |
| | | sensitivity | stress; | | (salt and sucrose); reduced sensitivity | | |
| | | | hormone | | to ABA | | |
| 113 | G481 | Osmotic | sensitivity | CAAT | Overexpressors more tolerant to high | 114 | (20-109) |
| | | | Abiotic | | sucrose in a germination assay | | |
| | | | stress | | | | |
| 115 | G1807 | Oxidative | Abiotic | bZIP | More sensitive to acifluorfen | 116 | (249-297) |
| | | | stress | | | | |
| 117 | G477 | Oxidative; | Abiotic | SBP | Increased sensitivity to oxidative stress; | 118 | (108-233) |
| | | Sclerotina | stress; | | increased susceptibility to Sclerotinia- | | |
| | | | disease | | caused disease | | |
| 119 | G789 | Oxidative; | Abiotic | HLH/ | Increased sensitivity to oxidative stress; | 120 | (253-313) |
| | | Sclerotina | stress; | MYC | increased susceptibility to Sclerotina- | | |
| | | | disease | | caused disease | | |
| 121 | G1836 | Sodium chloride | Abiotic | CAAT | Better germination in high salt | 122 | (30-164) |
| | | | stress | | | | |
| 123 | G196 | Sodium chloride | Abiotic | WRKY | Increased tolerance | 124 | (223-283) |
| | | | stress | | | | |
| 125 | G2110 | Sodium chloride | Abiotic | WRKY | Increased tolerance | 126 | (239-298) |
| | | | stress | | | | |
| 127 | G22 | Sodium chloride | Abiotic | AP2 | Increased tolerance to high salt | 128 | (89-157) |
| | | | stress | | | | |
| 129 | G2713 | Sodium chloride | Abiotic | TUBBY | Increased root growth | 130 | (59-270, |
| | | | stress | | | | 400-445) |
| 131 | G312 | Sodium chloride | Abiotic | SCR | Slightly better germination on | 132 | (320-336) |
| | | | stress | | high NaCl | | |
| 133 | G482 | Sodium chloride | Abiotic | CAAT | Increased tolerance to high salt | 134 | (25-116) |
| | | | stress | | | | |
| 135 | G801 | Sodium chloride | Abiotic | PCF | Better germination on NaCl | 136 | (32-93) |
| | | | stress | | | | |
| 137 | G867 | Sodium chloride | Abiotic | AP2 | Better seedling vigor | 138 | (59-124) |
| | | | stress | | | | |
| 139 | G884 | Sodium chloride | Abiotic | WRBCY | Increased root growth | 140 | (227-285, |
| | | | stress | | | | 407-465) |
| 141 | G2133 | Glyphosate | Herbicide | AP2 | Increased tolerance | 142 | (11-83) |
| | | | sensitivity | | | | |
| 143 | G2517 | Glyphosate | Herbicide | WRKY | Increased tolerance | 144 | (117-177) |
| | | | sensitivity | | | | |
| 145 | G343 | Glyphosate | Herbicide | GATA/ | Increase in resistance | 146 | (178-214) |
| | | | sensitivity | Zn | | | |
| 147 | G1062 | Hormone | Hormone | HLH/ | Altered response to the growth | 148 | (308-359) |
| | | sensitivity | sensitivity | MYC | hormone ethylene | | |
| 149 | G1095 | Hormone | Hormone | RING/ | Increased sensitivity to ACC | 150 | (134-159) |
| | | sensitivity | sensitivity | C3H2C3 | | | |
| 151 | G1134 | Hormone | Hormone | HLH/ | Altered response to the growth | 152 | (198-247) |
| | | sensitivity | sensitivity | MYC | hormone ethylene | | |
| 153 | G12 | Hormone | Hormone | AP2 | Increased sensitivity to ACC | 154 | (27-94) |
| | | sensitivity | sensitivity | | | | |
| 155 | G1330 | Hormone | Hormone | MYB- | Altered response to ethylene | 156 | (28-134) |
| | | sensitivity | sensitivity | (R1) | | | |
| | | | | R2R3 | | | |
| 157 | G1666 | Hormone | Hormone | HLH/ | Increased sensitivity to ACC | 158 | (353-420) |
| | | sensitivity | sensitivity | MYC | | | |
| 159 | G546 | Hormone | Hormone | RING/ | Decreased sensitivity to ABA | 160 | (114-155) |
| | | sensitivity | sensitivity | C3H2C3 | | | |
| 161 | G760 | Hormone | Hormone | NAC | hypersensitive to ACC | 162 | (12-156) |
| | | sensitivity | sensitivity | | | | |
| 163 | G913 | Hormone | Hormone | AP2 | Increased sensitivity to ACC | 164 | (62-128) |
| | | sensitivity | sensitivity | | | | |
| 165 | G1064 | Botrytis | Disease | PCF | Increased sensitivity | 166 | (116-179) |
| 167 | G1084 | Botrytis | Disease | BZIPT2 | Increased susceptibility | 168 | (1-53, |
| | | | | | | | 490-619) |
| 169 | G1196 | Botrytis | Disease | AKR | Increased susceptibility | 170 | (179-254) |
| 171 | G1255 | Botrytis | Disease | Z-CO- | Increased susceptibility | 172 | (18-56) |
| | | | | like | | | |
| 173 | G1514 | Botrytis | Disease | RING/ | Increased susceptibility | 174 | (20-50) |
| | | | | C3HC4 | | | |
| 175 | G1756 | Botrytis | Disease | WRKY | Increased susceptibility | 176 | (138-200) |
| 177 | G1880 | Botrytis | Disease | Z- | Increased resistance | 178 | (69-89, |
| | | | | C2H2 | | | 111-139) |
| 179 | G1919 | Botrytis | Disease | RING/ | Increased tolerance | 180 | (214-287) |
| | | | | C3HC4 | | | |
| 181 | G1936 | Botrytis; | Disease | PCF | Increased susceptibility | 182 | (64-129) |
| | | Sclerotina | | | | | |
| 183 | G1950 | Botrytis | Disease | AKR | Increased tolerance | 184 | (65-228) |
| 185 | G2069 | Botrytis | Disease | bZIP | Increased susceptibility | 186 | (to be |
| | | | | | | | determined) |
| 187 | G207 | Botrytis | Disease | MYB- | Increased susceptibility | 188 | (6-106) |
| | | | | (R1) | | | |
| | | | | R2R3 | | | |
| 189 | G2380 | Botrytis | Disease | TH | Increased susceptibility | 190 | (107-181) |
| 191 | G248 | Botrytis | Disease | MYB- | Increased susceptibility | 192 | (264-332) |
| | | | | (R1) | | | |
| | | | | R2R3 | | | |
| 193 | G2555 | Botrytis | Disease | HLH/ | Increased susceptibility | 194 | (175-245) |
| | | | | MYC | | | |
| 195 | G28 | Botrytis; | Disease | AP2 | Botrytis, Sclerotina: increased | 196 | (145-213) |
| | | Sclerotina; | | | tolerance; Erysiphe: increased | | |
| | | Erysiphe | | | resistance | | |
| 197 | G371 | Botrytis | Disease | RING/ | Increased susceptibility | 198 | (21-74) |
| | | | | C3HC4 | | | |
| 199 | G812 | Botrytis | Disease | HS | Increased tolerance | 200 | (31-120) |
| 201 | G865 | Botrytis | Disease | AP2 | Increased susceptibility | 202 | (36-103) |
| 203 | G940 | Botrytis | Disease | EIL | Increased susceptibility | 204 | (86-96) |
| 205 | G558 | Defense gene | Disease | bZIP | Increased expression of defense genes | 206 | (45-105) |
| | | expression | | | | | |
| 207 | G569 | Defense gene | Disease | bZIP | Decreased expression of defense genes | 208 | (90-153) |
| | | expression | | | | | |
| 209 | G1266 | Erysiphe | Disease | AP2 | Increased tolerance | 210 | (79-147) |
| 211 | G19 | Erysiphe | Disease | AP2 | Increased tolerance; repressed by | 212 | (76-145) |
| | | | | | methyl jasmonate and induced by ACC | | |
| 213 | G237 | Erysiphe | Disease | MYB- | Increased tolerance | 214 | (11-113) |
| | | | | (R1) | | | |
| | | | | R2R3 | | | |
| 215 | G378 | Erysiphe | Disease | RING/ | Increased resistance | 216 | (196-237) |
| | | | | C3H2C3 | | | |
| 217 | G409 | Erysiphe | Disease | HB | Increased tolerance | 218 | (64-124) |
| 219 | G591 | Erysiphe | Disease | HLH/ | Increased tolerance | 220 | (143-240) |
| | | | | MYC | | | |
| 221 | G616 | Erysiphe | Disease | TEO | Increased tolerance | 222 | (39-95) |
| 223 | G869 | Erysiphe | Disease | AP2 | Increased tolerance | 224 | (109-177) |
| 225 | G881 | Erysiphe | Disease | WRKY | Increased susceptibility | 226 | (176-233) |
| 227 | G1047 | Fusarium | Disease | bZIP | Increased tolerance | 228 | (129-180) |
| 229 | G1363 | Fusarium | Disease | CAAT | Increased tolerance | 230 | (174-226) |
| 231 | G147 | Fusarium | Disease | MADS | Increased susceptibility | 232 | (2-57) |
| 233 | G896 | Fusarium | Disease | Z- | Increased susceptibility | 234 | (18-39) |
| | | | | LSDlike | | | |
| 235 | G418 | Pseudomonas | Disease | HB | Increased tolerance | 236 | (500-560) |
| 237 | G525 | Pseudomonas | Disease | NAC | Increased tolerance | 238 | (23-167) |
| 239 | G1927 | Sclerotinia | Disease | NAC | Increased tolerance | 240 | (17-188) |
| 241 | G278 | Sclerotinia | Disease | AKR | Increased susceptibility | 242 | (2-593) |
| 243 | G594 | Sclerotinia | Disease | HLH/ | Increased susceptibility | 244 | (140-204) |
| | | | | MYC | | | |
| 245 | G805 | Sclerotinia | Disease | PCF | Increased susceptibility | 246 | (51-114) |

TABLE 5

| | | | Smallest | | |
|---|---|---|---|---|---|
| SEQ ID | | Test | Sum | | |
| NO | GID | Sequence ID | Probability | Test Sequence Species | Test Sequence GenBank Annotation |
| 25 | G720 | BG450227 | 3.20E−31 | [Medicago truncatula] | NF015E11DT1F1087 Drought Medicago trunc |
| 25 | G720 | AF318580 | 3.60E−26 | [Zea mays] | putative transcription factor ZmGLK1 (Glk1) mRNA, |
| 25 | G720 | AF318581 | 1.50E−22 | [Oryza sativa] | putative transcription factor OsGLK1 (Glk1) mR |
| 25 | G720 | AW906970 | 5.50E−20 | [Solanum tuberosum] | EST343197 potato stolon, Cornell Universi |
| 25 | G720 | BE330069 | 2.20E−15 | [Glycine max] | so73a08.y1 Gm-c1040 Glycine max cDNA clone GENO |
| 25 | G720 | AI896489 | 4.20E−15 | [Lycopersicon esculentum] | EST265932 tomato callus, TAMU Lycop |
| 25 | G720 | BI070070 | 4.70E−14 | [Populus tremula × | C013P55U Populus stra |
| | | | | Populus tremuloides] | |
| 25 | G720 | AW618051 | 3.10E−11 | [Lycopersicon pennellii] | EST314101 L. pennellii trichome, Cor |
| 25 | G720 | BG049455 | 1.80E−09 | [Sorghum bicolor] | OV1_20_B11.g1_A002 Ovary 1 (OV1) |
| | | | | | Sorghum bi |
| 25 | G720 | AW719680 | 1.20E−08 | [Lotus japonicus] | LjNEST8C3r Lotus japonicus |
| | | | | | nodule library 5 |
| 25 | G720 | gi11177540 | 1.30E−28 | [Zea mays] | putative transcription factor Golden2. |
| 25 | G720 | gi13940498 | 6.90E−28 | [Oryza sativa] | putative transcription factor OsGLK1. |
| 25 | G720 | gi4519671 | 5.60E−05 | [Nicotiana tabacum] | transfactor. |
| 25 | G720 | gi6942190 | 0.0022 | [Mesembryanthemum | CDPK substrate protein 1; C |
| | | | | crystallinum] | |
| 25 | G720 | gi5916207 | 0.0053 | [Chlamydomonas reinhardtii] | regulatory protein of P-starvat |
| 25 | G720 | gi1247386 | 0.23 | [Nicotiana alata] | PRP2. |
| 25 | G720 | gi169878 | 0.24 | [Sesbania rostrata] | nodulin. |
| 25 | G720 | gi1808688 | 0.3 | [Sporobolus stapfianus] | hypothetical protein. |
| 25 | G720 | gi99948 | 0.61 | [Glycine max] | proline-rich protein 2 precursor - soybean. |
| 25 | G720 | gi82091 | 0.7 | [Lycopersicon esculentum] | hydroxyproline-rich glycoprotein |
| 45 | G1792 | AI776626 | 1.20E−32 | [Lycopersicon esculentum] | EST257726 tomato resistant, Cornell |
| 45 | G1792 | BF646324 | 1.30E−29 | [Medicago truncatula] | NF074E05EC1F1038 Elicited cell culture |
| 45 | G1792 | BM178875 | 4.60E−29 | [Glycine max] | saj60f01.y1 Gm-c1072 Glycine max |
| | | | | | cDNA clone SOY |
| 45 | G1792 | AC025907 | 4.20E−27 | [Oryza sativa] | chromosome 10 clone nbxb0094K20, *** SEQUENCIN |
| 45 | G1792 | AP004623 | 1.90E−22 | [Oryza sativa | ( ) chromosome 8 clo |
| | | | | (japonica cultivar-group)] | |
| 45 | G1792 | BM268956 | 2.10E−22 | [Zea mays] | MEST402-H11.univ ISUM5-RN Zea mays |
| | | | | | cDNA clone MEST |
| 45 | G1792 | AF245119 | 3.80E−22 | [Mesembryanthemum | AP2-related transcription fac |
| | | | | crystallinum] | |
| 45 | G1792 | BH517030 | 2.10E−21 | [Brassica oleracea] | BOHRB76TF BOHR Brassica oleracea genomic |
| 45 | G1792 | BM437083 | 5.00E−21 | [Vitis vinifera] | VVA014A06_53661 An expressed sequence tag da |
| 45 | G1792 | BF275652 | 5.90E−21 | [Gossypium arboreum] | GA_Eb0024J23f Gossypium arboreum 7-10 d |
| 45 | G1792 | gi1732406 | 1.00E−24 | [Nicotiana tabacum] | S25-XP1 DNA binding protein. |
| 45 | G1792 | gi12597874 | 1.70E−24 | [Oryza sativa] | putative ethylene-responsive element binding |
| 45 | G1792 | gi7528276 | 3.60E−24 | [Mesembryanthemum | AP2-related transcription f |
| | | | | crystallinum] | |
| 45 | G1792 | gi2213783 | 3.30E−23 | [Lycopersicon esculentum] | Pti5. |
| 45 | G1792 | gi19034045 | 8.60E−23 | [Oryza sativa | putative DNA bindi |
| | | | | (japonica cultivar-group)] | |
| 45 | G1792 | gi8980313 | 8.60E−23 | [Catharanthus roseus] | AP2-domain DNA-binding protein. |
| 45 | G1792 | gi8809571 | 8.60E−23 | [Nicotiana sylvestris] | ethylene-responsive element binding |
| 45 | G1792 | gi17385636 | 5.50E−21 | [Matricaria chamomilla] | ethylene-responsive element binding |
| 45 | G1792 | gi8571476 | 5.00E−20 | [Atriplex hortensis] | apetala2 domain-containing protein. |
| 45 | G1792 | gi1688233 | 1.30E−19 | [Solanum tuberosum] | DNA binding protein homolog. |
| 175 | G1756 | AV423663 | 6.50E−34 | [Lotus japonicus] | AV423663 Lotus japonicus young plants (two- |
| 175 | G1756 | AW596933 | 3.10E−30 | [Glycine max] | sj84f07.y1 Gm-c1034 Glycine max |
| | | | | | cDNA clone GENO |
| 175 | G1756 | AW447931 | 8.40E−24 | [Triticum aestivum] | BRY_1082 BRY Triticum aestivum cDNA clone |
| 175 | G1756 | BI266533 | 1.50E−22 | [Medicago truncatula] | NF100A09IN1F1097 Insect herbivory Medic |
| 175 | G1756 | AW218278 | 1.10E−19 | [Lycopersicon esculentum] | EST303459 tomato radicle, 5 d post- |
| 175 | G1756 | AP002744 | 2.60E−18 | [Oryza sativa] | genomic DNA, chromosome 1, PAC clone: P0006C01, |
| 175 | G1756 | BG600477 | 3.00E−15 | [Solanum tuberosum] | EST505372 cSTS Solanum tuberosum cDNA clo |
| 175 | G1756 | gi11761072 | 7.10E−23 | [Oryza sativa] | hypothetical protein. |
| 175 | G1756 | gi4322940 | 3.10E−15 | [Nicotiana tabacum] | DNA-binding protein 2. |
| 175 | G1756 | gi1432056 | 9.00E−12 | [Petroselinum crispum] | WRKY3. |
| 175 | G1756 | gi4894963 | 2.00E−11 | [Avena sativa] | DNA-binding protein WRKY3. |
| 175 | G1756 | gi927025 | 7.40E−11 | [Cucumis sativus] | SPF1-like DNA-binding protein. |
| 175 | G1756 | gi13620227 | 2.50E−10 | [Lycopersicon esculentum] | hypothetical protein. |
| 175 | G1756 | gi11993901 | 6.10E−10 | [Dactylis glomerata] | somatic embryogenesis related protein. |
| 175 | G1756 | gi1159877 | 7.20E−10 | [Avena fatua] | DNA-binding protein. |
| 175 | G1756 | gi484261 | 8.60E−10 | [Ipomoea batatas] | SPF1 protein. |
| 175 | G1756 | gi3420906 | 1.30E−09 | [Pimpinella brachycarpa] | zinc finger protein; WRKY1. |
| 113 | G481 | BG440251 | 9.00E−42 | [Gossypium arboreum] | GA_Ea0006K20f Gossypium arboreum 7-10 d |
| 113 | G481 | BM887558 | 3.90E−41 | [Glycine max] | sam40c09.y1 Gm-c1068 Glycine max |
| | | | | | cDNA clone SOY |
| 113 | G481 | ZMNFYB | 1.70E−40 | [Zea mays] | Z. mays mRNA for CAAT-box DNA |
| | | | | | binding protein subun |
| 113 | G481 | AI728916 | 2.40E−40 | [Gossypium hirsutum] | BNLGHil2022 Six-day Cotton fiber Gossypi |
| 113 | G481 | AW775623 | 3.80E−40 | [Medicago truncatula] | EST334688 DSIL Medicago truncatula cDNA |
| 113 | G481 | AW738727 | 9.80E−40 | [Lycopersicon esculentum] | EST340154 tomato flower buds, anthe |
| 113 | G481 | BG599785 | 1.70E−38 | [Solanum tuberosum] | EST504680 cSTS Solanum tuberosum cDNA clo |
| 113 | G481 | BE413647 | 2.50E−38 | [Triticum aestivum] | SCU001.E10.R990714 ITEC SCU Wheat Endospe |
| 113 | G481 | BF065056 | 5.80E−38 | [Hordeum vulgare] | HV_CEb0022M01f Hordeum vulgare seedling gre |
| 113 | G481 | BG314203 | 1.00E−37 | [Triticum monococcum] | WHE2460_E10_I20ZS Triticum monococcum i |
| 113 | G481 | gi22380 | 1.10E−45 | [Zea mays] | CAAT-box DNA binding protein subunit B (NF-YB). |
| 113 | G481 | gi15408794 | 2.60E−30 | [Oryza sativa] | putative CCAAT-binding transcription factor |
| 113 | G481 | gi16902054 | 1.00E−28 | [Vernonia galamensis] | CCAAT-box binding factor HAP3 B domai |
| 113 | G481 | gi16902050 | 2.70E−28 | [Glycine max] | CCAAT-box binding factor HAP3 B domain. |
| 113 | G481 | gi16902056 | 4.30E−28 | [Argemone mexicana] | CCAAT-box binding factor HAP3 B domain. |
| 113 | G481 | gi16902058 | 1.50E−23 | [Triticum aestivum] | CCAAT-box binding factor HAP3 B domain. |
| 141 | G2133 | BE320193 | 1.20E−22 | [Medicago truncatula] | NF024B04RT1F1029 Developing root Medica |
| 141 | G2133 | AP003379 | 2.10E−20 | [Oryza sativa] | chromosome 1 clone P0408G07, *** SEQUENCING IN |
| 141 | G2133 | BG832521 | 1.50E−16 | [Pinus taeda] | NXPV_073_H03_FNXPV (Nsf Xylem Planings wood Ve |
| 141 | G2133 | BG046836 | 1.50E−15 | [Glycine max] | saa62d08.y1 Gm-c1060 Glycine max cDNA clone GEN |
| 141 | G2133 | BG321374 | 1.60E−15 | [Descurainia sophia] | Ds01_06d08_R Ds01_AAFC_ECORC_cold_stress |
| 141 | G2133 | BE432190 | 4.00E−15 | [Lycopersicon esculentum] | EST398719 tomato breaker fruit, TIG |
| 141 | G2133 | BI431368 | 6.70E−15 | [Solanum tuberosum] | EST534129 P. infestans-challenged leaf So |
| 141 | G2133 | AU085418 | 1.20E−14 | [Cryptomeria japonica] | AU085418 Cryptomeria japonica inner ba |
| 141 | G2133 | BG446456 | 2.80E−14 | [Gossypium arboreum] | GA_Eb0034M18f Gossypium arboreum 7-10 d |
| 141 | G2133 | AI728590 | 3.10E−14 | [Gossypium hirsutum] | BNLGHi11133 Six-day Cotton fiber Gossypi |
| 141 | G2133 | gi8571476 | 2.50E−16 | [Atriplex hortensis] | apetala2 domain-containing protein. |
| 141 | G2133 | gi14140155 | 3.30E−15 | [Oryza sativa] | putative AP2 domain transcription factor. |
| 141 | G2133 | gi5616086 | 3.00E−14 | [Brassica napus] | dehydration responsive element binding pro |
| 141 | G2133 | gi12225916 | 1.10E−13 | [Zea mays] | unnamed protein product. |
| 141 | G2133 | gi10798644 | 4.20E−13 | [Nicotiana tabacum] | AP2 domain-containing transcription fac |
| 141 | G2133 | gi8980313 | 1.90E−12 | [Catharanthus roseus] | AP2-domain DNA-binding protein. |
| 141 | G2133 | gi2213785 | 1.30E−11 | [Lycopersicon esculentum] | Pti6. |
| 141 | G2133 | gi6478845 | 7.30E−11 | [Matricaria chamomilla] | ethylene-responsive element binding |
| 141 | G2133 | gi12658319 | 1.20E−10 | [Hordeum vulgare] | CBF1-like protein BCBF1. |
| 141 | G2133 | gi8809573 | 1.50E−10 | [Nicotiana sylvestris] | ethylene-responsive element binding |
| 143 | G2517 | BI470088 | 1.50E−35 | [Glycine max] | saf38f09.y3 Gm-c1077 Glycine max cDNA clone GEN |
| 143 | G2517 | BI208323 | 2.60E−31 | [Lycopersicon esculentum] | EST526363 cTOS Lycopersicon esculen |
| 143 | G2517 | BE445081 | 4.40E−28 | [Triticum aestivum] | WHE1131_B06_D11ZS Wheat etiolated seedlin |
| 143 | G2517 | AV408330 | 2.40E−26 | [Lotus japonicus] | AV408330 Lotus japonicus young plants (two- |
| 143 | G2517 | BE362650 | 7.10E−26 | [Sorghum bicolor] | DG1_88_H02.b1_A002 Dark Grown 1 (DG1) Sorgh |
| 143 | G2517 | BI308031 | 4.70E−25 | [Medicago truncatula] | EST529441 GPOD Medicago truncatula cDNA |
| 143 | G2517 | AP002839 | 2.00E−23 | [Oryza sativa] | genomic DNA, chromosome 1, PAC clone: P0688A04, |
| 143 | G2517 | BE216050 | 4.60E−21 | [Hordeum vulgare] | HV_CEb0009E04f Hordeum vulgare seedling gre |
| 143 | G2517 | BG889690 | 8.70E−21 | [Solanum tuberosum] | EST515541 cSTD Solanum tuberosum cDNA clo |
| 143 | G2517 | L35779 | 7.50E−19 | [Brassica rapa] | BNAESTG Mustard flower buds Brassica rapa cDN |
| 143 | G2517 | gi11761085 | 2.10E−25 | [Oryza sativa] | putative DNA-binding protein homolog. |
| 143 | G2517 | gi9187622 | 1.10E−20 | [Solanum tuberosum] | WRKY DNA binding protein. |
| 143 | G2517 | gi4322940 | 6.70E−17 | [Nicotiana tabacum] | DNA-binding protein 2. |
| 143 | G2517 | gi1432058 | 5.40E−15 | [Petroselinum crispum] | WRKY2. |
| 143 | G2517 | gi1159877 | 5.10E−14 | [Avena fatua] | DNA-binding protein. |
| 143 | G2517 | gi3420906 | 5.80E−13 | [Pimpinella brachycarpa] | zinc finger protein; WRKY1. |
| 143 | G2517 | gi13620227 | 1.50E−12 | [Lycopersicon esculentum] | hypothetical protein. |
| 143 | G2517 | gi927025 | 6.40E−12 | [Cucumis sativus] | SPF1-like DNA-binding protein. |
| 143 | G2517 | gi4894963 | 1.40E−11 | [Avena sativa] | DNA-binding protein WRKY3. |
| 143 | G2517 | gi6723482 | 4.70E−11 | [Betula pendula] | wrky-type DNA binding protein. |
| 81 | G2140 | AI488313 | 4.80E−59 | [Lycopersicon esculentum] | EST246635 tomato ovary, TAMU Lycope |
| 81 | G2140 | BE020519 | 6.10E−55 | [Glycine max] | sm44g03.y1 Gm-c1028 Glycine max cDNA clone GENO |
| 81 | G2140 | AU093196 | 9.70E−46 | [Oryza sativa subsp. | AU093196 Rice callus Oryza sat |
| | | | | japonica] | |
| 81 | G2140 | AP003908 | 8.00E−39 | [Oryza sativa] | chromosome 8 clone OJ1300_C09, *** SEQUENCING |
| 81 | G2140 | BF647687 | 5.30E−37 | [Medicago truncatula] | NF025A04EC1F1024 Elicited cell culture |
| 81 | G2140 | AI054433 | 1.70E−26 | [Mesembryanthemum | R6-R97 Ice plant Lambda Uni-Z |
| | | | | crystallinum] | |
| 81 | G2140 | BE922838 | 1.70E−24 | [Solanum tuberosum] | EST426607 potato leaves and petioles Sola |
| 81 | G2140 | AU085144 | 1.80E−16 | [Cryptomeria japonica] | AU085144 Cryptomeria japonica inner ba |
| 81 | G2140 | BG275442 | 1.90E−13 | [Pinus taeda] | NXSI_141_F07_F NXSI (Nsf Xylem Side wood Inclin |
| 81 | G2140 | BE051300 | 6.30E−13 | [Zea mays] | za74h04.b50 Maize Glume cDNAs Library Zea mays cDN |
| 81 | G2140 | gi8570062 | 1.70E−27 | [Oryza sativa] | ESTs C26093(C11622), AU090634(C12429) corresp |
| 81 | G2140 | gi527655 | 0.00014 | [Pennisetum glaucum] | myc-like regulatory R gene product. |
| 81 | G2140 | gi22472 | 0.0055 | [Zea mays] | R-S protein (AA 1-612). |
| 81 | G2140 | gi527665 | 0.017 | [Sorghum bicolor] | myc-like regulatory R gene product. |
| 81 | G2140 | gi1086526 | 0.058 | [Oryza australiensis] | transcriptional activator Ra homolog. |
| 81 | G2140 | gi1086534 | 0.081 | [Oryza officinalis] | transcriptional activator Ra homolog. |
| 81 | G2140 | gi10998404 | 0.15 | [Petunia × hybrida] | anthocyanin 1. |
| 81 | G2140 | gi527663 | 0.15 | [Tripsacum australe] | myc-like regulatory R gene product. |
| 81 | G2140 | gi1086536 | 0.4 | [Oryza rufipogon] | transcriptional activator Ra homolog. |
| 81 | G2140 | gi1086530 | 0.49 | [Oryza longistaminata] | transcriptional activator Ra homolog |
| 49 | G1946 | LPHSF8 | 1.10E−119 | [Lycopersicon peruvianum] | L. peruvianum Lp-hsf8 mRNA for heat |
| 49 | G1946 | AC087771 | 4.10E−112 | [Medicago truncatula] | clone 8D15, *** SEQUENCING IN PROGRESS |
| 49 | G1946 | LEHSF8 | 5.90E−103 | [Lycopersicon esculentum] | L. esculentum Le-hsf8 gene for heat |
| 49 | G1946 | AW569138 | 3.10E−75 | [Glycine max] | si63g09.y1 Gm-r1030 Glycine max cDNA clone GENO |
| 49 | G1946 | BG890899 | 1.30E−70 | [Solarium tuberosum] | EST516750 cSTD Solanum tuberosum cDNA clo |
| 49 | G1946 | AC027658 | 4.60E−53 | [Oryza sativa] | subsp. japonica BAC nbxb0006I13, chromosome 10 |
| 49 | G1946 | AV833112 | 4.90E−52 | [Hordeum vulgare | AV833112 K. Sato unpublished |
| | | | | subsp. vulgare] | |
| 49 | G1946 | gi19492 | 2.80E−121 | [Lycopersicon peruvianum] | heat shock transcription factor 8 |
| 49 | G1946 | gi19260 | 5.10E−106 | [Lycopersicon esculentum] | heat stress transcription factor |
| 49 | G1946 | gi662924 | 2.00E−47 | [Glycine max] | heat shock transcription factor 21. |
| 49 | G1946 | gi5821138 | 9.70E−46 | [Nicotiana tabacum] | heat shock factor. |
| 49 | G1946 | gi11761077 | 2.90E−40 | [Oryza sativa] | putative heat shock factor protein 1 (HSF 1) |
| 49 | G1946 | gi886742 | 3.20E−40 | [Zea mays] | heat shock factor. |
| 49 | G1946 | gi7158882 | 2.70E−38 | [Medicago sativa] | heat shock transcription factor. |
| 49 | G1946 | gi3550588 | 1.90E−30 | [Pisum sativum] | heat shock transcription factor (HSFA). |
| 49 | G1946 | gi100546 | 0.46 | [Avena sativa] | avenin precursor - oat. |
| 49 | G1946 | gi14190783 | 1 | [Apium graveolens] | putative phloem transcription factor M1. |
| 71 | G1852 | AF220204 | 2.00E−95 | [Malus domestica] | unknown mRNA. |
| 71 | G1852 | BG597959 | 3.30E−95 | [Solanum tuberosum] | EST496637 cSTS Solanum tuberosum cDNA clo |
| 71 | G1852 | AC077693 | 4.50E−93 | [Oryza sativa] | chromosome 10 clone OSJNBa0095C07, *** SEQUENC |
| 71 | G1852 | BG445922 | 5.90E−91 | [Gossypium arboreum] | GA_Ea0030A23f Gossypium arboreum 7-10 d |
| 71 | G1852 | BG581705 | 1.60E−90 | [Medicago truncatula] | EST483440 GVN Medicago truncatula cDNA |
| 71 | G1852 | BF009089 | 5.30E−86 | [Glycine max] | ss73d04.y1 Gm-c1062 Glycine max cDNA clone GENO |
| 71 | G1852 | BE434670 | 2.20E−71 | [Lycopersicon esculentum] | EST405748 tomato breaker fruit, TIG |
| 71 | G1852 | BG317894 | 5.90E−56 | [Pinus taeda] | NXPV_006_H10_F NXPV (Nsf Xylem Planings wood Ve |
| 71 | G1852 | AV422410 | 1.20E−55 | [Lotus japonicus] | AV422410 Lotus japonicus young plants (two- |
| 71 | G1852 | AI055434 | 1.20E−50 | [Gossypium hirsutum] | coau0003P22 Cotton Boll Abscission Zone |
| 71 | G1852 | gi5734619 | 1.30E−103 | [Oryza sativa] | Similar to Arabidopsis thaliana BAC F15P23 ( |
| 71 | G1852 | gi6752888 | 1.80E−98 | [Malus × domestica] | unknown. |
| 71 | G1852 | gi498042 | 0.81 | [Senecio odorus] | ORF. |
| 71 | G1852 | gi4432741 | 1 | [Dioscorea tenuipes] | phosphoglucose isomerase. |
| 95 | G325 | AB001888 | 9.20E−43 | [Oryza sativa] | mRNA for zinc finger protein, complete cds, |
| 95 | G325 | BE558327 | 5.40E−30 | [Hordeum vulgare] | HV_CEb0017D19f Hordeum vulgare seedling gre |
| 95 | G325 | BG644908 | 1.80E−29 | [Medicago truncatula] | EST506527 KV3 Medicago truncatula cDNA |
| 95 | G325 | BG605313 | 3.10E−29 | [Triticum aestivum] | WHE2331_C04_F07ZS Wheat pre-anthesis spik |
| 95 | G325 | BG459023 | 1.60E−28 | [Zea mays] | 947052H08.y1 947 - 2 week shoot from Barkan lab Ze |
| 95 | G325 | BG590826 | 3.20E−28 | [Solanum tuberosum] | EST498668 P. infestans-challenged leaf So |
| 95 | G325 | BG412316 | 4.40E−27 | [Sorghum bicolor] | OV2_40_D10.b1_A002 Ovary 2 (OV2) Sorghum bi |
| 95 | G325 | BG127619 | 1.50E−25 | [Lycopersicon esculentum] | EST473181 tomato shoot/meristem Lyc |
| 95 | G325 | AW399335 | 7.70E−22 | [Lycopersicon pennellii] | EST309835 L. pennellii trichome, Cor |
| 95 | G325 | AW780799 | 3.90E−21 | [Glycine max] | sl76c08.y1 Gm-c1027 Glycine max cDNA clone GENO |
| 95 | G325 | gi3618320 | 5.60E−49 | [Oryza sativa] | zinc finger protein. |
| 95 | G325 | gi3341723 | 1.40E−13 | [Raphanus sativus] | CONSTANS-like 1 protein. |
| 95 | G325 | gi11037311 | 5.00E−13 | [Brassica nigra] | constans-like protein. |
| 95 | G325 | gi2303683 | 6.00E−13 | [Brassica napus] | unnamed protein product. |
| 95 | G325 | gi4091806 | 2.80E−12 | [Malus × domestica] | CONSTANS-like protein 2. |
| 95 | G325 | gi10946337 | 7.00E−11 | [Ipomoea nil] | CONSTANS-like protein. |
| 95 | G325 | gi4557093 | 6.50E−10 | [Pinus radiata] | zinc finger protein. |
| 17 | G2583 | AW928465 | 1.40E−43 | [Lycopersicon esculentum] | EST337253 tomato flower buds 8 mm t |
| 17 | G2583 | BE023297 | 2.40E−42 | [Glycine max] | sm80e10.y1 Gm-c1015 Glycine max cDNA clone GENO |
| 17 | G2583 | AP003615 | 1.60E−30 | [Oryza sativa] | chromosome 6 clone P0486H12, *** SEQUENCING IN |
| 17 | G2583 | AU088998 | 2.90E−21 | [Lotus japonicus] | AU088998 Lotus japonicus flower bud cDNA Lo |
| 17 | G2583 | AT001828 | 4.60E−20 | [Brassica rapa subsp. | AT001828 Flower bud cDNA Br |
| | | | | pekinensis] | |
| 17 | G2583 | BG415973 | 2.40E−18 | [Hordeum vulgare] | HVSMEk0009E06f Hordeum vulgare testa/perica |
| 17 | G2583 | BF647090 | 3.80E−17 | [Medicago truncatula] | NF007A06EC1F1038 Elicited cell culture |
| 17 | G2583 | BG560598 | 2.90E−16 | [Sorghum propinquum] | RHIZ2_59_D07.b1_A003 Rhizome2 (RHIZ2) So |
| 17 | G2583 | AW011200 | 6.60E−16 | [Pinus taeda] | ST17H08 Pine TriplEx shoot tip library Pinus ta |
| 17 | G2583 | BF479478 | 1.60E−15 | [Mesembryanthemum crystallinum] | L48-3155T3 Ice plant Lambda U |
| 17 | G2583 | gi19507 | 1.40E−16 | [Lupinus polyphyllus] | put. pPLZ2 product (AA 1-164). |
| 17 | G2583 | gi10798644 | 1.00E−12 | [Nicotiana tabacum] | AP2 domain-containing transcription fac |
| 17 | G2583 | gi8571476 | 4.70E−12 | [Atriplex hortensis] | apetala2 domain-containing protein. |
| 17 | G2583 | gi2213783 | 8.40E−12 | [Lycopersicon esculentum] | Pti5. |
| 17 | G2583 | gi8809573 | 5.30E−11 | [Nicotiana sylvestris] | ethylene-responsive element binding |
| 17 | G2583 | gi4099914 | 8.40E−11 | [Stylosanthes hamata] | ethylene-responsive element binding p |
| 17 | G2583 | gi6478845 | 8.90E−11 | [Matricaria chamomilla] | ethylene-responsive element binding |
| 17 | G2583 | gi15290041 | 9.40E−11 | [Oryza sativa] | hypothetical protein. |
| 17 | G2583 | gi12225884 | 1.70E−10 | [Zea mays] | unnamed protein product. |
| 17 | G2583 | gi3264767 | 3.40E−10 | [Prunus armeniaca] | AP2 domain containing protein. |
| 21 | G1322 | AW032656 | 3.60E−43 | [Lycopersicon esculentum] | EST276215 tomato callus, TAMU Lycop |
| 21 | G1322 | BF649523 | 5.40E−42 | [Medicago truncatula] | NF080G02EC1F1019 Elicited cell culture |
| 21 | G1322 | BG369720 | 1.50E−41 | [Hordeum vulgare] | HVSMEi0025K10f Hordeum vulgare 20 DAP spike |
| 21 | G1322 | BF325282 | 2.60E−41 | [Glycine max] | su20e03.y1 Gm-c1066 Glycine max cDNA clone GENO |
| 21 | G1322 | CPU33917 | 6.40E−41 | [Craterostigma plantagineum] | myb-related transcription factor |
| 21 | G1322 | AW255388 | 2.40E−40 | [Mentha × piperita] | ML407 peppermint glandular trichome Menth |
| 21 | G1322 | AB052230 | 1.30E−39 | [Arabis gemmifera] | gene for MYB transcription factor Atmyb2, |
| 21 | G1322 | AY026332 | 9.40E−39 | [Oryza sativa] | Myb transcription factor JAMyb mRNA, complete |
| 21 | G1322 | PSMYB26 | 1.10E−37 | [Pisum sativum] | P. sativum mRNA for Myb-like protein (Myb26). |
| 21 | G1322 | AI055122 | 4.30E−37 | [Gossypium hirsutum] | coau0003B15 Cotton Boll Abscission Zone |
| 21 | G1322 | gi1002796 | 5.50E−49 | [Craterostigma plantagineum] | Cpm10. |
| 21 | G1322 | gi13177578 | 3.00E−46 | [Oryza sativa] | Myb transcription factor JAMyb. |
| 21 | G1322 | gi1841475 | 1.50E−39 | [Pisum sativum] | Myb26. |
| 21 | G1322 | gi14249015 | 9.00E−39 | [Gossypium hirsutum] | myb-like transcription factor Myb 5. |
| 21 | G1322 | gi82306 | 3.10E−37 | [Antirrhinum majus] | myb protein 305 - garden snapdragon. |
| 21 | G1322 | gi8247759 | 7.40E−34 | [Triticum aestivum] | GAMyb protein. |
| 21 | G1322 | gi2130046 | 2.30E−33 | [Hordeum vulgare] | MybHv5 protein - barley. |
| 21 | G1322 | gi15082210 | 7.50E−33 | [Fragaria × ananassa] | transcription factor MYB1. |
| 21 | G1322 | gi5139806 | 1.10E−31 | [Glycine max] | GmMYB29A2. |
| 21 | G1322 | gi1732247 | 2.90E−31 | [Nicotiana tabacum] | transcription factor Myb1. |
| 23 | G303 | BE021887 | 5.70E−28 | [Glycine max] | sm63g05.y1 Gm-c1028 Glycine max cDNA clone GENO |
| 23 | G303 | BI480474 | 8.60E−28 | [Triticum aestivum] | WHE2903_F02_L03ZS Wheat aluminum-stressed |
| 23 | G303 | AC079935 | 5.40E−27 | [Oryza sativa] | clone OSJNBa0095C06, *** SEQUENCING IN PROGRES |
| 23 | G303 | AW573949 | 1.50E−22 | [Medicago truncatula] | EST316540 GVN Medicago truncatula cDNA |
| 23 | G303 | BF200153 | 1.30E−21 | [Triticum monococcum] | WHE2252_F02_K04ZE Triticum monococcum s |
| 23 | G303 | CAR011013 | 2.20E−18 | [Cicer arietinum] | epicotyl EST, clone Can133. |
| 23 | G303 | BE357342 | 2.60E−11 | [Sorghum bicolor] | DG1_148_D06.g1_A002 Dark Grown 1 (DG1) Sorg |
| 23 | G303 | BG275269 | 3.10E−11 | [Pinus taeda] | NXSI_138_F10_F NXSI (Nsf Xylem Side wood Inclin |
| 23 | G303 | BF588006 | 7.50E−10 | [Sorghum propinquum] | FM1_35_E08.g1_A003 Floral-Induced Merist |
| 23 | G303 | AI491136 | 2.00E−09 | [Lycopersicon esculentum] | EST241845 tomato shoot, Cornell Lyc |
| 23 | G303 | gi3641870 | 1.40E−22 | [Cicer arietinum] | hypothetical protein. |
| 23 | G303 | gi1086538 | 9.60E−05 | [Oryza rufipogon] | transcriptional activator Rb homolog. |
| 23 | G303 | gi1086534 | 0.00082 | [Oryza officinalis] | transcriptional activator Ra homolog. |
| 23 | G303 | gi527661 | 0.0015 | [Phyllostachys acuta] | myc-like regulatory R gene product. |
| 23 | G303 | gi527653 | 0.005 | [Pennisetum glaucum] | myc-like regulatory R gene product. |
| 23 | G303 | gi22195 | 0.0078 | [Zea mays] | regulatory protein. |
| 23 | G303 | gi13161337 | 0.014 | [Oryza sativa] | putative transcription activator. |
| 23 | G303 | gi10998404 | 0.014 | [Petunia × hybrida] | anthocyanin 1. |
| 23 | G303 | gi1086526 | 0.052 | [Oryza australiensis] | transcriptional activator Ra homolog. |
| 23 | G303 | gi527665 | 0.072 | [Sorghum bicolor] | myc-like regulatory R gene product. |
| 239 | G1927 | BG350410 | 3.30E−63 | [Solarium tuberosum] | 091B07 Mature tuber lambda ZAP Solanum tu |
| 239 | G1927 | BF066070 | 8.80E−48 | [Hordeum vulgare] | HV_CEb0014M06f Hordeum vulgare seedling gre |
| 239 | G1927 | AW736414 | 1.80E−47 | [Medicago truncatula] | EST332428 KV3 Medicago truncatula cDNA |
| 239 | G1927 | BG159075 | 7.10E−47 | [Sorghum propinquum] | RHIZ2_17_E07.b1_A003 Rhizome2 (RHIZ2) So |
| 239 | G1927 | BI543350 | 7.70E−39 | [Beta vulgaris] | S1A_F6 Sugar Beet peroxide germination cDNA 1 |
| 239 | G1927 | BE131060 | 9.20E−38 | [Mesembryanthemum | L48-1010T3 Ice plant Lambda U |
| | | | | crystallinum] | |
| 239 | G1927 | BI140602 | 1.00E−37 | [Sorghum bicolor] | IP1_51_D12.b1_A002 Immature pannicle 1 (IP1 |
| 239 | G1927 | AI779001 | 4.30E−37 | [Lycopersicon esculentum] | EST259880 tomato susceptible, Corne |
| 239 | G1927 | BF484725 | 6.40E−36 | [Triticum aestivum] | WHE2319_A01_B01ZS Wheat pre-anthesis spik |
| 239 | G1927 | BE449422 | 7.30E−35 | [Lycopersicon hirsutum] | EST356181 L. hirsutum trichome, Corne |
| 239 | G1927 | gi7716952 | 4.10E−40 | [Medicago truncatula] | NACl. |
| 239 | G1927 | gi6175246 | 1.10E−35 | [Lycopersicon esculentum] | jasmonic acid 2. |
| 239 | G1927 | gi15148914 | 4.70E−35 | [Phaseolus vulgaris] | NAC domain protein NAC2. |
| 239 | G1927 | gi1279640 | 3.30E−34 | [Petunia × hybrida] | NAM. |
| 239 | G1927 | gi6730938 | 4.70E−34 | [Oryza sativa] | OsNAC4 protein. |
| 239 | G1927 | gi4485513 | 4.10E−31 | [Solanum tuberosum] | putative NAC domain protein. |
| 239 | G1927 | gi6732156 | 4.20E−31 | [Triticum monococcum] | unnamed protein product. |
| 239 | G1927 | gi4218535 | 1.30E−30 | [Triticum sp.] | GRAB1 protein. |
| 239 | G1927 | gi4996349 | 6.30E−25 | [Nicotiana tabacum] | NAC-domain protein. |
| 239 | G1927 | gi2982275 | 2.60E−08 | [Picea mariana] | ATAF1-like protein. |
| 53 | G226 | EE451172 | 1.00E−43 | [Brassica napus] | BNBS2DCT Brassica napus cDNA 5-, mRNA sequence |
| 53 | G226 | AC189293 | 4.00E−31 | [Brassica rapa] | Brassica rapa subsp. pekinensis clone |
| | | | | | KBrB026F |
| 53 | G226 | CS49378 | 6.00E−15 | [Vitis vinifera] | Sequence 664 from Patent WO2006130156 |
| 53 | G226 | AI495284 | 1.10E−14 | [Glycine max] | sa90e06.y1 Gm-c1004 Glycine max cDNA clone GENO |
| 53 | G226 | DW174878 | 1.00E−09 | [Lactuca virosa] | CLVZ637.b1_I16.ab1 CLV(XYZ) lettuce virosa |
| | | | | | Lactuca virosa |
| 53 | G226 | CO051707.1 | 5.00E−06 | [Malus × domestica] | Mdfw2055b05 5- similar to TR: O22059 O22059 PUTATIVE |
| 53 | G226 | CV241641 | 8.00E−05 | [Populus trichocarpa] | WS02512_N01 3-, mRNA sequence |
| 53 | G226 | BE412359 | 3.30E−05 | [Triticum aestivum] | JJL005.E04R990604 ITEC JJL Wheat Leaf Lib |
| 53 | G226 | BF617445 | 9.60E−05 | [Hordeum vulgare] | HVSMEc0017G08f Hordeum vulgare seedling sho |
| 53 | G226 | AP002843 | 2.30E−03 | [Oryza sativa] | genomic DNA, chromosome 1, PAC clone: P0407B12. |
| 53 | G226 | gi54290864 | 4.00E−12 | [Oryza sativa] | BAD61525 hypothetical protein [Oryza sativa |
| 53 | G226 | gi7446159 | 2.00E−09 | [Gossypium hirsutum] | T09744 myb-related protein - upland cotton |
| 53 | G226 | gi2921334 | 2.00E−09 | [Gossypium hirsutum] | MYB-like DNA-binding domain protein |
| 53 | G226 | gi15082210 | 8.00E−09 | [Fragaria × ananassa] | transcription factor MYB1 [Fragaria × |
| | | | | | ananassa] |
| 53 | G226 | gi29824962 | 1.00E−08 | [Anthurium andraeanum] | putative flavonoid/anthocyanin regulator |
| 53 | G226 | gi29569834 | 1.00E−08 | [Zea mays] | myb-related protein c1-I-2K1 [Zea mays] |
| 53 | G226 | gi15042124 | 1.70E−05 | [Zea luxurians] | CI protein |
| 53 | G226 | gi14701793 | 5.40E−05 | [Sorghum bicolor] | Myb1-like protein. |
| 53 | G226 | gi14701793 | 5.10E−04 | [Petunia axillaris] | An2 truncated protein |
| 53 | G226 | gi14269335 | 7.60E−04 | [Gossypium herbaceum] | myb-like transcription factor Myb 3 |

The application's sequence listing, which the Patent Office published only in electronic form, follows.

SEQUENCE LISTING (281 sequences)

SEQ ID NO: 1 - DNA, 1011 bp, Arabidopsis thaliana
  G1322
aaagttattgatagtttctgttacttattaatttttaaggttatgtgtattattaccaattggaggactatatagtcgcaagtctcaaccctataaaagaaaacattcgtcgatcatcttcccgcctcgagtatctctctctctctctctcttctctgttttctttattgattgcatagacaaaaatacacacatacacaacagaaagaaagatggagacgacgatgaagaagaaagggagagtgaaagcgacaataacgtcacagaaagaagaagaaggaacagtgagaaaaggaccttggactatggaagaagatttcatcctctttaattacatccttaatcatggtgaaggtctttggaactctgtcgccaaagcctctggtctaaaacgtactggaaaaagttgtcggctccggtggctgaactatctccgaccagatgtgcggcgagggaacataaccgaagaagaacagcttttgatcattcagcttcatgctaagcttggaaacaggtggtcgaagattgcgaagcatcttccgggaagaacggacaacgagataaagaacttctggaggacaaagattcagagacacatgaaagtgtcatcggaaaatatgatgaatcatcaacatcattgttcgggaaactcacagagctcggggatgacgacgcaaggcagctccggcaaagccatagacacggctgagagcttctctcaggcgaagacgacgacgtttaatgtggtggaacaacagtcaaacgagaattactggaacgttgaagatctgtggcccgtccacttgcttaatggtgaccaccatgtgatttaagatatatatatagacctcctatacatttatatgccccagctgggtttttttgtatggtacgttatttggtttttctattgctgaaatgtcgttgcatttaatttacatacgaaaagtgcattaaatcattaaatcttcaatacatatggaggtggtgtttgagtaaaaaaaaaaaaaa

SEQ ID NO: 2 - protein, 206 aa, Arabidopsis thaliana
  G1322 Polypeptide (domain in AA coordinates:26-130)
METTMKKKGRVKATITSQKEEEGTVRKGPWTMEEDFILFNYILNHGEGLWNSVAKASGLKRTGKSCRLRWLNYLRPDVRRGNITEEEQLLIIQLHAKLGNRWSKIAKHLPGRTDNEIKNFWRTKIQRHMKVSSENMMNHQHHCSGNSQSSGMTTQGSSGKAIDTAESFSQAKTTTFNVVEQQSNENYWNVEDLWPVHLLNGDHHVI

SEQ ID NO: 3 - DNA, 1019 bp, Arabidopsis thaliana
  G2130
cctctcttcattttttaactccctctctctctctctctctatggagagacgaacgagacgagtgaagttcacagagaatcgtacggtcacaaacgtagcagctacaccatctaacgggtctccgagactggtccgtatcactgttactgatcctttcgctactgactcgtctagcgacgacgacgacaacaacaacgtcacggtggttccaagagtgaaacgatacgtgaaggagattagattctgccaaggtgaatcttcttcctccaccgcggcgaggaaaggtaagcacaaggaggaggaaagcgtagtggttgaagatgacgtgtcgacgtcggtgaagcctaaaaagtacagaggcgtgagacagagaccttggggaaaattcgcggcggagattagagatccgtcgagccgtactcggatttggcttgggacttttgtcacggcggaggaagctgctatagcgtacgatagagccgcgattcatctcaaaggacctaaagcgctcacgaatttcctaactccgccgacgccaacgccggttatcgatctccaaacggtttccgcctgcgattacggtagagattctcggcagagccttcattcaccgacctctgttctaagattcaacgtcaacgaggaaacagagcatgagattgaagcgatcgagctatctccggagagaaagtcgacggttataaaagaagaagaagaatcgtcggcgggtttggtgttcccggatccgtatctgttaccggatttatctctcgccggcgaatgtttttgggataccgaaattgcccctgaccttttgtttctcgatgaagaaaccaaaatccaatcaacgttgttaccaaacacagaggtttcgaaacaaggagaaaacgaaactgaagatttcgagtttggtttgattgatgatttcgagtcttctccatgggatgtggatcatttcttcgaccatcatcatcactctttcgattaaaaatctcttcttttttggggaaatttttgtg

SEQ ID NO: 4 - protein, 315 aa, Arabidopsis thaliana
  G2130 Polypeptide (domain in AA coordinates 93-160)
MERRTRRVKFTENRTVTNVAATPSNGSPRLVRITVTDPFATDSSSDDDDNNNVTVVPRVKRYVKEIRFCQGESSSSTAARKGKHKEEESVVVEDDVSTSVKPKKYRGVRQRPWGKFAAEIRDPSSRTRIWLGTFVTAEEAAIAYDRAAIHLKGPKALTNFLTPPTPTPVIDLQTVSACDYGRDSRQSLHSPTSVLRFNVNEETEHEIEAIELSPERKSTVIKEEEESSAGLVFPDPYLLPDLSLAGECFWDTEIAPDLLFLDEETKIQSTLLPNTEVSKQGENETEDFEFGLIDDFESSPWDVDHFFDHHHHSFD

SEQ ID NO: 5 - DNA, 1547 bp, Arabidopsis thaliana
  G256
tcgtgagcgttgtgtttctcctcaacattcaaagtctttagtgaaacctctcttgtaagaagccaaaaaaataaagagaaagattcaaagaaggaaagaaattgaggatgactatttcaagtccaaagagagattttgagtagaccctcttcacaaaaatccaatcttagagtcttactagttactatctagcttacatacacagagacactataccaaaaatccaatcttattagagtacttactatatagcttacacatacacacacacgaagtactatttcaacgatcaagagcgtgtgcgtgaggatatgggtagaccaccttgttgcgagaagattgaggtgaagaaaggaccatggactcccgaagaagacataatcttggtctcttatatccaacaacacggccctggaaattggagatctgtccctgcaaacaccggtttgctaaggtgtagcaagagttgcagacttagatggactaattaccttcgtcccgggatcaaacgaggaaatttcactcaaccggaagagaagatgatcatccaccttcaagctcttttgggaaatagatgggcagctatagcatcatatctacctcagaggaccgacaatgatatcaagaactactggaacactcatcttaaaaagaaactagtgatgatgaagtttcaaaatggtatcatcaacgaaaacaaaaccaatctggcaacagatatttcgtcttgtaataataacaacaatggatgtaatcacaacaaaaggaccaccaacaaaggccaatgggagaaaaaacttcaaacagacatcaacatggccaaacaagccttattccaagccttgtcacttgaccaaccatcttcattgatccctcccgatcctgactcaccaaaacctcatcatcattctaccaccacttatgcctcaagcacagataacatctctaaattactccagaactggacaagctcatcatcgtcaaagcctaacacttcatcagtctccaacaaccggagctcaagccccggtgaaggaggactttttgatcatcactctttgttctcatcgaattcagaatctggatcagttgatgagaagctgaatttgatgtccgagacaagcatgttcaaaggtgagagcaagccagacatagacatggaagctacacctactactactactactactactgatgatcaaggctcgttgtcattgatcgagaaatggttgtttgatgatcaaggcttggttcagtgtgatgatagtcaagaagatctcatcgacgtgtctttagaggagttaaaataatgataacaacagtcaagatttgttctataagaaaataaaacgtatagaacaacgataaagctagctaggtttattaatttttctttcttttgtcttttctctatgatctttagttacattttattttactgtgtggcttgcttgtggtcaagtcgatgaagatcaaactgtgatatactatttatatgtaaagtactataaagttaagagtagttgaataaaaaaaaaaaaaaaaaa

SEQ ID NO: 6 - protein, 332 aa, Arabidopsis thaliana
  G256 Polypeptide (domain in AA coordinates: 13-115)
MGRPPCCEKIEVKKGPWTPEEDIILVSYIQQHGPGNWRSVPANTGLLRCSKSCRLRWTNYLRPGIKRGNFTQPEEKMIIHLQALLGNRWAAIASYLPQRTDNDIKNYWNTHLKKKLVMMKFQNGIINENKTNLATDISSCNNNNNGCNHNKRTTNKGQWEKKLQTDINMAKQALFQALSLDQPSSLIPPDPDSPKPHHHSTTTYASSTDNISKLLQNWTSSSSSKPNTSSVSNNRSSSPGEGGLFDHHSLFSSNSESGSVDEKLNLMSETSMFKGESKPDIDMEATPTTTTTTTDDQGSLSLIEKWLFDDQGLVQCDDSQEDLIDVSLEELK

SEQ ID NO: 7 - DNA, 1249 bp, Arabidopsis thaliana
  G394
gaaattcttaacaaacaattttcttcataatattaattctcaagatcttaaagattatattaatacgaagagaaaattcaaatgggtcttgatgattcatgcaacacaggtcttgttcttggtttaggcctctcaccaacgcctaataattacaatcatgccatcaagaaatcttcctccactgtggaccatcgtttcatcaggctcgatccgtcgttgactctaagcctatccggtgagagctacaagatcaagactggtgccggcgccggcgaccaaatttgccggcagacctcgtcccacagcggcatctcatctttctcgagcggaagggtaaagagagaaagagaaatctccggcggcgatggagaagaagaggcggaggagacgacggagagagtggtgtgttcgagagtgagtgatgatcatgacgatgaagaaggtgttagtgctcgtaaaaagcttagactcactaaacaacaatctgctcttctcgaagataacttcaaacttcatagcacccttaatcccaagcaaaaacaagctcttgcgagacagctgaatctaaggcctagacaagttgaagtgtggttccaaaacaggagagctagaacaaaactaaagcaaacagaagtggattgtgagtttttgaagaaatgttgcgagactttaacggatgagaatagaaggcttcaaaaagagcttcaagaccttaaggctttaaaattgtctcaaccgttttacatgcacatgccggcggcgactttgactatgtgcccttcttgtgagagactcggcggtggtggtgtcggaggagatacgacggcggttgatgaagaaacggcgaaaggagctttctccatcgtcacaaagcctcgtttctataaccctttcactaatccttctgcagcatgttagttacttattagttatttaattctttttgttggttttttttttgtttcttaaatcaaattaggaattagttagaagataaatcccagggaaaaaatattacgttgaaattggggggaaatggggtatagtctttatagataagactcttcaacgattccactttatttttcggtgggattgttggttgatgaagaaaaaaaaatagtttgtaattacaggtttaaatatgtagagaaaaaatgacgaatatgtattatcttgtttttttttccttcgaatatgtattacggtaatataaatttgcttgtaaaaataataaatatattatttg

SEQ ID NO: 8 - protein, 278 aa, Arabidopsis thaliana
  G394 Polypeptide (domain in AA coordinates: 121-182)
MGLDDSCNTGLVLGLGLSPTPNNYNHAIKKSSSTVDHRFIRLDPSLTLSLSGESYKIKTGAGAGDQICRQTSSHSGISSFSSGRVKREREISGGDGEEEAEETTERVVCSRVSDDHDDEEGVSARKKLRLTKQQSALLEDNFKLHSTLNPKQKQALARQLNLRPRQVEVWFQNRRARTKLKQTEVDCEFLKKCCETLTDENRRLQKELQDLKALKLSQPFYMHMPAATLTMCPSCERLGGGGVGGDTTAVDEETAKGAFSIVTKPRFYNPFTNPSAAC

SEQ ID NO: 9 - DNA, 1087 bp, Arabidopsis thaliana
  G664
caatccctcaatataaaataacaagtagaattgatctgcctatatataagattttgagacgaaataagatctaaaccacaagaaagaaagtaaacataaaagtatgggaaggtcaccgtgctgtgagaaagctcacacaaacaaaggagcatggacgaaagaagaggacgagaggctcgtcgcctacattaaagctcatggagaaggctgctggagatctctccccaaagccgccggacttcttcgctgtggcaagagctgccgtctccggtggatcaactatctccggcctgaccttaagcgtggaaacttcaccgaggaagaagacgaactcatcatcaagctccatagccttcttggcaacaaatggtcgcttattgccgggagattaccgggaagaacagataacgagataaagaactattggaacacgcatatacgaagaaagcttataaacagagggattgatccaacgagtcatagaccaatccaagaatcatcagcttctcaagattctaaacctacacaactagaaccagttacgagtaataccattaatatctcattcacttctgctccaaaggtcgaaacgttccatgaaagtataagctttccgggaaaatcagagaaaatctcaatgcttacgttcaaagaagaaaaagatgagtgcccagttcaagaaaagttcccagatttgaatcttgagctcagaatcagtcttcctgatgatgttgatcgtcttcaagggcatggaaagtcaacaacgccacgttgtttcaagtgcagcttagggatgataaacggcatggagtgcagatgcggaagaatgagatgcgatgtagtcggaggtagcagcaaggggagtgacatgagcaatggatttgattttttagggttggcaaagaaagagaccacttctcttttgggctttcgaagcttggagatgaaataatattgtcaaattttaggcgtaactgtacaaaacttttgcctagataatttgaaagtatatcttcaacttgtatgagaaatttaactggtgaattataatatatagaatttgttttttaaaaaaaaaaaaaaaaaa

SEQ ID NO: 10 - protein, 282 aa, Arabidopsis thaliana
  G664 Polypeptide (domain in AA coordinates: 13-116)
MGRSPCCEKAHTNKGAWTKEEDERLVAYIKAHGEGCWRSLPKAAGLLRCGKSCRLRWINYLRPDLKRGNFTEEEDELIIKLHSLLGNKWSLIAGRLPGRTDNEIKNYWNTHIRRKLINRGIDPTSHRPIQESSASQDSKPTQLEPVTSNTINISFTSAPKVETFHESISFPGKSEKISMLTFKEEKDECPVQEKFPDLNLELRISLPDDVDRLQGHGKSTTPRCFKCSLGMINGMECRCGRMRCDVVGGSSKGSDMSNGFDFLGLAKKETTSLLGFRSLEMK

SEQ ID NO: 11 - DNA, 1747 bp, Arabidopsis thaliana
  G864
tgcaaaaacattttcttgtctctcctctgcccaaattttttttctttccaggaatatttcctagaaaaacccaagcaaagctttaaccccttcctcctccaaaagtagcatcttcctctttttctatttctcctttcctcttcttatctctctctcgtttgtgaacgattccttaagaatataaccaaaagcccttttctcctttcttcaactttccgggaaaaatcttcacgcagcaaggtttctctctcggctctcgcagtgtttttcgggccttttgttctttctataaaaaaaaaattcgcgtcctttaagaaaactttttccacctagagaagaagaagagtatcactcttgttgttcaagtttctctctttaataaaaaatccatctttattctttgtcttctttcctttttgctttccctaatctctatgttataaacacacagagagaaacaaagtcacagtctcgagtcaaaaacagagaatacgaaagaaaaatggaagcggagaagaaaatggttctaccgagaatcaaattcacagagcacaaaaccaacacgacaacaatcgtatcggagttaaccaacactcaccaaaccaggattcttcgtatctcagtcactgacccagacgctactgattcctccagtgacgacgaagaagaagaacatcaacgctttgtctctaaacgccgtcgtgttaagaagtttgtcaacgaagtctatctcgattccggtgctgttgttactggtagttgtggtcaaatggagtcgaagaagagacaaaagagagcggttaaatcggagtctactgtttctccggttgtttcagcgacgacgactacgacgggagagaagaagttccgaggagtgagacagcgtccatggggaaaatgggcggcggagataagagatccgttgaaacgtgtacggctctggttaggtacttacaacacggcggaagaagctgctatggtttacgataacgccgctattcagcttcgtggtcccgacgctctgactaatttctcagtcactccgacaacagcgacggagaagaaagccccaccaccgtctccggtgaagaagaagaagaagaaaaacaacaaaagcaaaaaatccgttactgcttcttcctccatcagcagaagcagcagcaacgattgtctctgctctccggtgtctgttctccgatctcctttcgccgtcgacgaattctccggcatttcttcatcaccagtcgcggccgttgtagtcaaggaagagccatccatgacaacggtatctgaaactttctctgatttctcggcgcccttgttctcagatgatgacgtgttcgatttccggagctcagtggttcccgactatctcggcggcgatttatttggggaagatctattcacggcggatatgtgtacggatatgaacttcggattcgatttcggatccggattatccagctggcacatggaggaccattttcaagatatcggggatctattcgggtcggatcctcttttagctgtttaataatattttaaataaataaatagttataccggccgttactaaacggaaccggagaaagttttgtataccggtgacataaaatctcggttatgttcgtaatctttttttctttgttatatataaaaatatgaatgaaactgaattaatgtaagttaatggtgataattattaacgttttaagttttgaaaaaaaaaaaaaaaaaaaaaaaaaaa

SEQ ID NO: 12 - protein, 343 aa, Arabidopsis thaliana
  G864 Polypeptide (domain in AA coordinates: 119-186)
MEAEKKMVLPRIKFTEHKTNTTTIVSELTNTHQTRILRISVTDPDATDSSSDDEEEEHQRFVSKRRRVKKFVNEVYLDSGAVVTGSCGQMESKKRQKRAVKSESTVSPVVSATTTTTGEKKFRGVRQRPWGKWAAEIRDPLKRVRLWLGTYNTAEEAAMVYDNAAIQLRGPDALTNFSVTPTTATEKKAPPPSPVKKKKKKNNKSKKSVTASSSISRSSSNDCLCSPVSVLRSPFAVDEFSGISSSPVAAVVVKEEPSMTTVSETFSDFSAPLFSDDDVFDFRSSVVPDYLGGDLFGEDLFTADMCTDMNFGFDFGSGLSSWHMEDHFQDIGDLFGSDPLLAV

SEQ ID NO: 13 - DNA, 609 bp, Arabidopsis thaliana
  G1820
atggctgagaacaacaacaacaacggcgacaacatgaacaacgacaaccaccagcaaccaccgtcgtactcgcagctgccgccgatggcatcatccaaccctcagttacgtaattactggattgagcagatggaaaccgtctcggatttcaaaaaccgtcagcttccattggctcgaattaagaagatcatgaaggctgatccagatgtgcacatggtctccgcagaggctccgatcatcttcgcaaaggcttgcgaaatgttcatcgttgatctcacgatgcggtcgtggctcaaagccgaggagaacaaacgccacacgcttcagaaatcggatatctccaacgcagtggctagctctttcacctacgatttccttcttgatgttgtccctaaggacgagtctatcgccaccgctgatcctggctttgtggctatgccacatcctgacggtggaggagtaccgcaatattattatccaccgggagtggtgatgggaactcctatggttggtagtggaatgtacgcgccatcgcaggcgtggccagcagcggctggtgacggggaggatgatgctgaggataatggaggaaacggcggcggaaattga

SEQ ID NO: 14 - protein, 202 aa, Arabidopsis thaliana
  G1820 Polypeptide (domain in AA coordinates: 70-133)
MAENNNNNGDNMNNDNHQQPPSYSQLPPMASSNPQLRNYWIEQMETVSDFKNRQLPLARIKKIMKADPDVHMVSAEAPIIFAKACEMFIVDLTMRSWLKAEENKRHTLQKSDISNAVASSFTYDFLLDVVPKDESIATADPGFVAMPHPDGGGVPQYYYPPGVVMGTPMVGSGMYAPSQAWPAAAGDGEDDAEDNGGNGGGN

SEQ ID NO: 15 - DNA, 724 bp, Arabidopsis thaliana
  G912
catcttatccaaagaaaaaatgaatccattttactctacattcccagactcgtttctctcaatctccgatcatagatctccggtttcagacagtagtgagtgttcaccaaagttagcttcaagttgtccaaagaaacgagctgggaggaagaagtttcgtgagacacgtcatccgatttacagaggagttcgtcagaggaattctggtaaatgggtttgtgaagttagagagcctaataagaaatctaggatttggttaggtacttttccgacggttgaaatggctgctcgtgctcatgatgttgctgctttagctcttcgtggtcgctctgcttgtctcaatttcgctgattctgcttggcggcttcgtattcctgagactacttgtcctaaggagattcagaaagctgcgtctgaagctgcaatggcgtttcagaatgagactacgacggagggatctaaaactgcggcggaggcagaggaggcggcaggggagggggtgagggagggggagaggagggcggaggagcagaatggtggtgtgttttatatggatgatgaggcgcttttggggatgcccaacttttttgagaatatggcggaggggatgcttttgccgccgccggaagttggctggaatcataacgactttgacggagtgggtgacgtgtcactctggagttttgacgagtaattttttggctctttttctggataataagtt

SEQ ID NO: 16 - protein, 224 aa, Arabidopsis thaliana
  G912 Polypeptide (domain in AA coordinates:51-118)
MNPFYSTFPDSFLSISDHRSPVSDSSECSPKLASSCPKKRAGRKKFRETRHPIYRGVRQRNSGKWVCEVREPNKKSRIWLGTFPTVEMAARAHDVAALALRGRSACLNFADSAWRLRIPETTCPKEIQKAASEAAMAFQNETTTEGSKTAAEAEEAAGEGVREGERRAEEQNGGVFYMDDEALLGMPNFFENMAEGMLLPPPEVGWNHNDFDGVGDVSLWSFDE

SEQ ID NO: 17 - DNA, 653 bp, Arabidopsis thaliana
  G2583
caaatcagaaaatatagagtttgaaggaaactaaaagatggtacattcgaggaagttccgaggtgtccgccagcgacaatggggttcttgggtctctgagattcgccatcctctattgaagagaagagtgtggcttggaactttcgaaacggcagaagcggctgcaagagcatacgaccaagcggctcttctaatgaacggccaaaacgctaagaccaatttccctgtcgtaaaatcagaggaaggctccgatcacgttaaagatgttaactctccgttgatgtcaccaaagtcattatctgagcttttgaacgctaagctaaggaagagctgcaaagacctaacgccttctttgacgtgtctccgtcttgatactgacagttcccacattggagtttggcagaaacgggccgggtcgaaaacaagtccgacttgggtcatgcgcctcgaacttgggaacgtagtcaacgaaagtgcggttgacttagggttgactacgatgaacaaacaaaacgttgagaaagaagaagaagaagaagaagctattattagtgatgaggatcagttagctatggagatgatcgaggagttgctgaattggagttgacttttgactttaacttgttgcaagtccacaaggggtaagggttttc

SEQ ID NO: 18 - protein, 189 aa, Arabidopsis thaliana
  G2583 Polypeptide (domain in AA coordinates:4-71)
MVHSRKFRGVRQRQWGSWVSEIRHPLLKRRVWLGTFETAEAAARAYDQAALLMNGQNAKTNFPVVKSEEGSDHVKDVNSPLMSPKSLSELLNAKLRKSCKDLTPSLTCLRLDTDSSHIGVWQKRAGSKTSPTWVMRLELGNVVNESAVDLGLTTMNKQNVEKEEEEEEAIISDEDQLAMEMIEELLNWS

SEQ ID NO: 19 - DNA, 768 bp, Arabidopsis thaliana
  G975
attactcatcatcaagttcctactttctctctgacaaacatcacagagtaagtaagaatggtacagacgaagaagttcagaggtgtcaggcaacgccattggggttcttgggtcgctgagattcgtcatcctctcttgaaacggaggatttggctagggacgttcgagaccgcagaggaggcagcaagagcatacgacgaggccgccgttttaatgagcggccgcaacgccaaaaccaactttcccctcaacaacaacaacaccggagaaacttccgagggcaaaaccgatatttcagcttcgtccacaatgtcatcctcaacatcatcttcatcgctctcttccatcctcagcgccaaactgaggaaatgctgcaagtctccttccccatccctcacctgcctccgtcttgacacagccagctcccatatcggcgtctggcagaaacgggccggttcaaagtctgactccagctgggtcatgacggtggagctaggtcccgcaagctcctcccaagagactactagtaaagcttcacaagacgctattcttgctccgaccactgaagttgaaattggtggcagcagagaagaagtattggatgaggaagaaaaggttgctttgcaaatgatagaggagcttctcaatacaaactaaatcttatttgcttatatatatgtacctattttcattgctgatttacagccaaaataatcaattataccgtgtattttatagatgttttatattaaaaggttgttagatata

SEQ ID NO: 20 - protein, 199 aa, Arabidopsis thaliana
  G975 Polypeptide (domain in AA coordinates: 4-71)
MVQTKKFRGVRQRHWGSWVAEIRHPLLKRRIWLGTFETAEEAARAYDEAAVLMSGRNAKTNFPLNNNNTGETSEGKTDISASSTMSSSTSSSSLSSILSAKLRKCCKSPSPSLTCLRLDTASSHIGVWQKRAGSKSDSSWVMTVELGPASSSQETTSKASQDAILAPTTEVEIGGSREEVLDEEEKVALQMIEELLNTN

SEQ ID NO: 21 - DNA, 1011 bp, Arabidopsis thaliana; identical to SEQ ID NO: 1
  G1322

SEQ ID NO: 22 - protein, 206 aa, Arabidopsis thaliana; identical to SEQ ID NO: 2
  G1322 Polypeptide (domain in AA coordinates:26-130)

SEQ ID NO: 23 - DNA, 1072 bp, Arabidopsis thaliana
  G303
aaaagataacgtagccattaacttttatgcattaactccttcatttctttttgtgctcgtttggttgagagagagagaggctatatatgatgttccaacaagattaccctcatggcttttcactcgtggaaacatccttaagttacgaaatgttggattactttcaaaacatcgtcgtttcgaactctgaagacgtggcgtcacagcaaaattccatttcgtcctcttcttattcatcagcgacactctcctgctccataacagagcaaaaatctcacttaactgaaaagttatctcctctacgagaaagatatggttgcggtgactttctgtcgcggaagaggagaaggagaagtgaaaaaacgattgtagataaagagaatcaaaggatgaatcacattgccgtcgagcgtaaccggagaaaacagatgaatcattttctgtctatcctcaagtctatgatgcctctctcttattctcaacctaatgaccaagcatcaatcatagaagggaccattagctatctgaagaagctagaacaacgtctccaatctctcgaagcccaattaaaagctactaaactcaatcaatcaccaaatatattttccgacttcttcatgttccctcaatactccaccgccactgccactgccaccgccactgcctcctcatcctcctcgagccaccaccatcacaagcgactagaggtggttgctgacgtggaggttacaatggtagaaagacatgccaacattaaagtgttaacgaagacacagccaagattgctcttcaagattatcaatgagtttaactctttaggtttaagtactcttcatctcaacctcacaacttccaaagacatgtctctcttcacttttagcgtcaaggtagaggcagattgtcaattgacgccttctggtaatgaggtcgcaaatacggtgcatgaagtcgttagaagagttcacaaggaacgttgaattttgtttacatactagctaactttgaaattctattttattgtataaacaatctcttatgtgtgtaatttacatatatacaattaattaacatt

SEQ ID NO: 24 - protein, 296 aa, Arabidopsis thaliana
  G303 Polypeptide (domain in AA coordinates: 92-161)
MMFQQDYPHGFSLVETSLSYEMLDYFQNIVVSNSEDVASQQNSISSSSYSSATLSCSITEQKSHLTEKLSPLRERYGCGDFLSRKRRRRSEKTIVDKENQRMNHIAVERNRRKQMNHFLSILKSMMPLSYSQPNDQASIIEGTISYLKKLEQRLQSLEAQLKATKLNQSPNIFSDFFMFPQYSTATATATATASSSSSSHHHHKRLEVVADVEVTMVERHANIKVLTKTQPRLLFKIINEFNSLGLSTLHLNLTTSKDMSLFTFSVKVEADCQLTPSGNEVANTVHEVVRRVHKER

SEQ ID NO: 25 - DNA, 2209 bp, Arabidopsis thaliana
  G720
ctttgaatgtgactcaggatagagagagggcgagacagataaagagagcttgaggaaggatttaagcagatctgcaagaaacactctctcagtgtttactttttttccgtagaatcaaaccggcggcgacagtgacggcggcgaaaagcggcggtgttggccgcaaaaacgatgcaaaaccagctatggtcattaccgctaacgatttatcaaaatgggaaaattttcctaaaggacttaaggttcttcttctcctcaacggctgtgacagcgacggagatggctcctcagccgccgagactcgatcagagctcgaatcaatggactatatcgttactacattcaccgatgaaactgaagcactctctgcggttgtcaagaacccggagagcttccacattgccatcgtcgaggtgaatatgagcgctgagagtgagagtttcaagtttcttgaggctgccaaagacgttcttcctactataatgatttcaaccgatcattgcatcactactacaatgaaatgcatagcgcttggtgcagttgagttcctacaaaaaccgctctcaccggagaaattaaagaacatttggcagcatgttgttcataaggcattcaatgatggtggaagtaatgtttcgatatcacttaagccagtgaaagaatccgttgtctcgatgcttcatcttgagaccgacatgacaatcgaggagaaagatccagcgccatcaacaccgcaattgaaacaagattcacggttactagacggtgattgccaagagaacataaatttctcgatggaaaatgtaaattcctcgaccgagaaagataacatggaagatcatcaagacatcggtgaatctaaatcagtcgacactacaaaccgcaaattagatgacgacaaagtggttgtcaaagaagagagaggagacagtgaaaaagaagaagaaggtgaaaccggagatctcataagcgagaagacagattcagttgatattcataagaaagaagatgagactaaaccgattaataaatcatccgggatcaagaacgtgtctggtaacaaaactagtcgaaagaaggtggattggacaccagagctgcacaagaagtttgtgcaagcagttgagcaactcggcgttgatcaagcgataccctcgcggattcttgagttgatgaaagtaggcaccttaacaagacacaatgtagctagtcaccttcagaaatttcggcagcataggaagaatattcttccaaaggatgatcataaccatagatggatacaatctagagagaaccatagaccaaatcaacgtaattataacgtttttcaacagcaacaccgtcccgtgatggcttatcccgtttggggtcttcccggtgtttatccgccaggagcgattccacctttgtggccaccgccgctgcagtccattggtcaaccacctccgtggcattggaaaccaccttatccaacggtgagcggtaatgcatggggttgtccggttggaccgcctgtgaccggatcatatattactccttcgaatactaccgccggcggatttcaatatcccaacggagctgaaaccggcttcaaaataatgccggcgagtcagccggacgaggaaatgttagatcaagtggttaaagaagcgataagcaaaccgtggctgccgctaccgctcgggctaaaaccgccgtccgcggagagcgttttggctgagctaacgcgtcaaggcatctcagccgtcccttcttcttcttgtctaatcaacggctctcatcgtctccgctgacgtgtccatgatgaaacagaacccgcagatatgatgacgtcatgcgtggcgtacttgtccgtgtctgacgatccgaagcgggaactgattcggatcctgagagttgttttttaattgttgtttttaattttttgttgtcataaaaacatttgtctctattggtattattaaagaagatcggacggtggagatagaggcaacgatgttagtctgaggaccacaagtggactctgcggctgtaagtagatctcggacacgggattttgacaagtcggaatctgacgtgtgtgcgtactcgcttttgtgggttgtcgagaatttaatagttgacactgttttaggtggatatgagatatgatgatgataataataaaaaggtacaactcaaagattccgtgatgaaaaaaaaaaaaaaa

SEQ ID NO: 26 - protein, 535 aa, Arabidopsis thaliana
  G720 Polypeptide (domain in AA coordinates: 301-349)
MVITANDLSKWENFPKGLKVLLLLNGCDSDGDGSSAAETRSELESMDYIVTTFTDETEALSAVVKNPESFHIAIVEVNMSAESESFKFLEAAKDVLPTIMISTDHCITTTMKCIALGAVEFLQKPLSPEKLKNIWQHVVHKAFNDGGSNVSISLKPVKESVVSMLHLETDMTIEEKDPAPSTPQLKQDSRLLDGDCQENINFSMENVNSSTEKDNMEDHQDIGESKSVDTTNRKLDDDKVVVKEERGDSEKEEEGETGDLISEKTDSVDIHKKEDETKPINKSSGIKNVSGNKTSRKKVDWTPELHKKFVQAVEQLGVDQAIPSRILELMKVGTLTRHNVASHLQKFRQHRKNILPKDDHNHRWIQSRENHRPNQRNYNVFQQQHRPVMAYPVWGLPGVYPPGAIPPLWPPPLQSIGQPPPWHWKPPYPTVSGNAWGCPVGPPVTGSYITPSNTTAGGFQYPNGAETGFKIMPASQPDEEMLDQVVKEAISKPWLPLPLGLKPPSAESVLAELTRQGISAVPSSSCLINGSHRLR

SEQ ID NO: 27 - DNA, 890 bp, Arabidopsis thaliana
  G913
cattcaaaaacatcatatatatacacaaacacactttgatacaacaaaaaaaaacagaacacaaacaaaaacacattgtaacattagtttaagcattaagcttctttatgtcgaataataataattctccgaccaccgtgaatcaagaaacgacgacgtctcgtgaagtctcaatcacattgcctactgatcaatctcctcaaacctcaccaggatcatcttcttctccttcaccgagaccttccggtggatcaccggcgagaagaacggcgactggattatccggcaagcactctattttcagggggattcgactacgtaacggaaaatgggtatcggagattagagagccacgtaaaacgacaagaatttggctcgggacttatccggtaccggagatggctgccgccgcttacgacgtggctgcgttagctttaaaaggacccgacgccgttttgaattttcctggtttagctttgacttacgtggctccggtttcaaactctgctgcggatataagagcggctgctagtagagcagcggagatgaagcaaccggatcagggtggggatgagaaggtattggaaccggttcaacccggcaaagaggaagaattagaagaagtgtcgtgtaactcgtgttcgttggagtttatggatgaggaagcgatgttgaatatgccgactttgttgacggagatggctgaagggatgttgatgagtccaccgagaatgatgatacatccgacgatggaagatgattcgccggagaatcatgaaggagataatctttggagttataaatgaatccattgaagctgctctcttttttattgttttccggtcgaatgagattttccccctttttttttttctttttgggtcgctgtt

SEQ ID NO: 28 - protein, 232 aa, Arabidopsis thaliana
  G913 Polypeptide (domain in AA coordinates: 62-128)
MSNNNNSPTTVNQETTTSREVSITLPTDQSPQTSPGSSSSPSPRPSGGSPARRTATGLSGKHSIFRGIRLRNGKWVSEIREPRKTTRIWLGTYPVPEMAAAAYDVAALALKGPDAVLNFPGLALTYVAPVSNSAADIRAAASRAAEMKQPDQGGDEKVLEPVQPGKEEELEEVSCNSCSLEFMDEEAMLNMPTLLTEMAEGMLMSPPRMMIHPTMEDDSPENHEGDNLWSYK

SEQ ID NO: 29 - DNA, 720 bp, Arabidopsis thaliana
  G1305
atggggaatagaagagcaccatgctgtgacaaaagccaagtgaagagagggccatggagtgatgaagaaagtgaaagactcagatcttttatcctcaaaaatggtcatcaaaattggcgatctcttcccaaactcgctggattgatgagatgcggaaagagttgtcgtctaagatggataaactatctgagaccaggtctcaaacgaggcaacttcaccaaggaggaggaagataccattatccaccttcaccaagcttatggaaacaagtggtctaagatcgcatccaacttcccgggaaggacagacaacgagatcaagaatgtatggaacactcatctcaagaagcggttggtgaagaggagcatttcatcatcatcatccgatgttaccaatcattcagtgtcttctacctcttcttcctcttcctcaatctcgtcagtcttgcaggacgttattattaagagtgagaggcctaaccaggaagaggagtttggggaaatcttggtggagcaaatggcatgtggatttgaggtggatgcaccacaatcactagaatgtctctttgacgatagccaggttcctcctcctatatctaaaccagactcactacaaacccatgggaagtcatcagatcacgaattttggagccgactgattgaaccagggttcgatgattacaatgagtggctcattttcttggataaccaaacttgctag

SEQ ID NO: 30 - protein, 239 aa, Arabidopsis thaliana
  G1305 Polypeptide (conserved domain in AA coordinates:15-118)
MGNRRAPCCDKSQVKRGPWSDEESERLRSFILKNGHQNWRSLPKLAGLMRCGKSCRLRWINYLRPGLKRGNFTKEEEDTIIHLHQAYGNKWSKIASNFPGRTDNEIKNVWNTHLKKRLVKRSISSSSSDVTNHSVSSTSSSSSSISSVLQDVIIKSERPNQEEEFGEILVEQMACGFEVDAPQSLECLFDDSQVPPPISKPDSLQTHGKSSDHEFWSRLIEPGFDDYNEWLIFLDNQTC

SEQ ID NO: 31 - DNA, 1144 bp, Arabidopsis thaliana
  G1645
cgtcgacctcccaacactaactccatgtttataacggaaaaacaagtgtggatggatgagatcgtcgcaagaagagcttcttcttcttgggacttccctttcaacgacattaatattcatcagcatcatcatcgtcactgcaacacaagtcatgagtttgaaatcttgaagagtcctcttggagatgtagcggttcacgaagaagagagtaataataataaccctaatttcagtaacagcgagagtggtaagaaggagacaacagatagtggtcagtcttggtcctcgtcgtcttcaaaaccatcggtcttggggagaggacattggagaccagctgaagatgttaaactcaaagagcttgtctccatttacggcccacaaaactggaacctcatagctgaaaagcttcaaggaagatctgggaagagctgtagactacgatggtttaaccaattggacccgaggataaaccgaagagctttcacagaagaagaagaggagaggctgatgcaagcacataggctttatggtaacaaatgggcaatgattgcgaggcttttccctggtagaactgataattcagtgaagaaccattggcatgttgtcatggctcgtaagtatagagaacactcttctgcttaccgtaggagaaagcttatgagtaataatccacttaaacctcacctcaccaataatcatcatcctaaccctaaccctaattaccactcttttatctccactaatcattacttcgctcagcctttccccgagtttaatttgactcatcacctggttaataatgcccctatcacgagtgaccataaccagcttgtgttgcctttccattgctttcaaggttatgagaacaatgaacctccgatggttgtgagtatgtttggcaaccaaatgatggtcggcgataacgttggtgccacgtcagacgcgttatgcaatattccgcacattgaccctagtaaccaagagaaaccggagccaaatgatgcaatgcattggatcggaatggacgcggtagatgaggaggtgttcgaaaaggctaagcagcaaccacattttttcgattttcttggcttggggacggcgtgaatgttgaacaaattggtgttaatcagataacgacagtggc

SEQ ID NO: 32 - protein, 359 aa, Arabidopsis thaliana
  G1645 Polypeptide (domain in AA coordinates: 90-210)
MFITEKQVWMDEIVARRASSSWDFPFNDINIHQHHHRHCNTSHEFEILKSPLGDVAVHEEESNNNNPNFSNSESGKKETTDSGQSWSSSSSKPSVLGRGHWRPAEDVKLKELVSIYGPQNWNLIAEKLQGRSGKSCRLRWFNQLDPRINRRAFTEEEEERLMQAHRLYGNKWAMIARLFPGRTDNSVKNHWHVVMARKYREHSSAYRRRKLMSNNPLKPHLTNNHHPNPNPNYHSFISTNHYFAQPFPEFNLTHHLVNNAPITSDHNQLVLPFHCFQGYENNEPPMVVSMFGNQMMVGDNVGATSDALCNIPHIDPSNQEKPEPNDAMHWIGMDAVDEEVFEKAKQQPHFFDFLGLGTA

SEQ ID NO: 33 - DNA, 1009 bp, Arabidopsis thaliana
  G1841
cattccgaaaagtacttgtttattggtgttattcatcgctgctcaaggtggcaaaccaaggagaacaagaagagtccagggccaatgagcctgagggtatcaaatcagtgattgatgacatctacatttttgaagacgaccctgtggttgataggttcaataggtttggcacggagatgtctgccatggtctcggccttgacacaggtggtttctgctcgctctcagactgaggctgaaggtgctcactctcagactgaggctgaaggtgctcactcttcttcctcttcggctggacataaaagaggatggcttggaatcgattctgctcctattccctcatcatttgctcgtgtagactcttcacataatccgatcgaagaatccatgagcaaggcatttccagaggaagcaagggagaaaaaaaggaggtacagaggagtaaggcagagaccatggggcaaatgggcagctgagatacgtgatccacatagagccgctagggtttggctcgggacgtttgatacagcggaggccgcggctagagcctacgacgaggctgcactccggttccgtggaaataaagcaaagctaaatttcccagaggatgtaaggattcttcctcctccccctcctcttcttcgttcaccagctgacacggtggcgaataaagcagaagaggatctgataaattattggagttatacaaagttgttgcaaagttcaggccaacggtcatttctcgagcgaggacaagaagagagtagtaacatatttgaacattcaccaatggaacaacctctgcctccttcaagttctggtccaagttcctctaattttcctgcaccttctctacctaatacatagtttcacttttattaaagctctacaaatacaattaaatacatagctaaatgaaaatgattttcttgtctgtataccttcttaagtgctaaacaatatattgtactctttgttttccttaactaaaaaaaaaaaaaaaaaaaaaa

SEQ ID NO: 34 - protein, 229 aa, Arabidopsis thaliana
  G1841 Polypeptide (domain in AA coordinates: 83-150)
MSAMVSALTQVVSARSQTEAEGAHSQTEAEGAHSSSSSAGHKRGWLGIDSAPIPSSFARVDSSHNPIEESMSKAFPEEAREKKRRYRGVRQRPWGKWAAEIRDPHRAARVWLGTFDTAEAAARAYDEAALRFRGNKAKLNFPEDVRILPPPPPLLRSPADTVANKAEEDLINYWSYTKLLQSSGQRSFLERGQEESSNIFEHSPMEQPLPPSSSGPSSSNFPAPSLPNT

SEQ ID NO: 35 - DNA, 1997 bp, Arabidopsis thaliana
  G2430
aacttcaacatacacataatctctcacttaaaaatatctctctctctctctctacaaaatcaattccaatgttggtgggaaagataagtggatatgaagataatactcgctctttggagcgagaaacatctgaaatcacttctcttctcagccaatttccggggaatactaatgtccttgttgttgacaccaatttcaccactctactcaacatgaaacaaatcatgaaacaatacgcttatcaagtgtctattgagacagatgcagaaaaagctcttgcgtttttgacaagctgcaaacatgaaatcaatattgtgatttgggattttcatatgcctggaattgatggacttcaagctctcaagagcattacttcaaagttggatttacctgtagtgattatgtctgatgataatcaaacggaatctgtgatgaaagcaacattttacggtgcttgtgactatgttgtgaaaccggttaaagaagaggtaatggccaatatatggcaacacattgtacggaagaggctgatctttaaaccggatgttgctccaccggttcaatcagatccggctcgctctgaccgtttagaccaagtcaaagctgatttcaagatcgtagaagatgaaccaataatcaatgagacaccgctgatcacatggaccgaagaaattcaaccggttcagtcagatctggttcaagccaacaagttcgaccaagtgaatggctattccccaatcatgaaccaagataacatgttcaacaaagcaccacctaaaccgcgaatgacgtggacagaagttattcaaccggttcaatcaaatctggttcaaacaaaagagttcggccaactcaatgactattcccaaatcatgaaccaagatagcatgtacaacaaagcagcaaccaaaccacaattgacgtggaccgaagaaattcaaccggttcaatcaggtctggttcaagccaacgagttcagcaaagtgaatggatattcccaaagcatgaaccaagatagcatgttcaacaaatcagcaaccaacccgcgattgacatggaacgaattacttcaaccggttcaatcagatctggttcaatccaatgagtttagccaattcagtgactattctcaaatcatgaacgaagataacatgttcaacaaagcagcaaagaaaccgcggatgacatggagtgaagtatttcaaccggttcaatcacatctggttccgactgacggtttagaccgagaccactttgattccataaccataaacggaggtaacggcatacaaaacatggaaaagaaacaaggaaaaaaaccacggaagccgcggatgacgtggaccgaagagcttcaccaaaaatttctggaagccatcgaaataattggtggtatcgaaaaagctaacccaaaggtacttgtcgaatgcttgcaagaaatgaggatagaaggaattactagaagcaatgtggcaagtcatcttcagaaacaccgtatcaatcttgaagaaaaccaaattcctcaacaaacacaagggaatggttgggccactgcgtatggtacactagctccctctctccaaggttcagacaatgtcaacacaacaataccatcgtaccttatgaatggtccagccactttgaaccaaatccagcagaatcaatatcaaaatggtttcttgacaatgaacaacaaccagatcataaccaatcctccgcctcctttgccctatttggaccatcatcaccaacagcaacatcagtcttctcctcaatttaattacctgatgaacaatgaagaacttcttcaagcctctggcctctctgcgacagatcttgaactcacttatccaagtttaccatatgatccacaagagtatctaatcaatggctacaattataattagtcatatagcccttctctttacttaaggcagtctatgtatgacaaataatatgcgacttcccttgtgagtcacaatattgtttcattattc

SEQ ID NO: 36 - protein, 612 aa, Arabidopsis thaliana
  G2430 Polypeptide (domain in AA coordinates:425-478)
MLVGKISGYEDNTRSLERETSEITSLLSQFPGNTNVLVVDTNFTTLLNMKQIMKQYAYQVSIETDAEKALAFLTSCKHEINIVIWDFHMPGIDGLQALKSITSKLDLPVVIMSDDNQTESVMKATFYGACDYVVKPVKEEVMANIWQHIVRKRLIFKPDVAPPVQSDPARSDRLDQVKADFKIVEDEPIINETPLITWTEEIQPVQSDLVQANKFDQVNGYSPIMNQDNMFNKAPPKPRMTWTEVIQPVQSNLVQTKEFGQLNDYSQIMNQDSMYNKAATKPQLTWTEEIQPVQSGLVQANEFSKVNGYSQSMNQDSMFNKSATNPRLTWNELLQPVQSDLVQSNEFSQFSDYSQIMNEDNMFNKAAKKPRMTWSEVFQPVQSHLVPTDGLDRDHFDSITINGGNGIQNMEKKQGKKPRKPRMTWTEELHQKFLEAIEIIGGIEKANPKVLVECLQEMRIEGITRSNVASHLQKHRINLEENQIPQQTQGNGWATAYGTLAPSLQGSDNVNTTIPSYLMNGPATLNQIQQNQYQNGFLTMNNNQIITNPPPPLPYLDHHHQQQHQSSPQFNYLMNNEELLQASGLSATDLELTYPSLPYDPQEYLINGYNYN

SEQ ID NO: 37 - DNA, 759 bp, Arabidopsis thaliana
  G3
gtttgtcttttatcaatggaaagagaacaagaagagtctacgatgagaaagagaaggcagccacctcaagaagaagtgcctaaccacgtggctacaaggaagccgtacagagggatacggaggaggaagtggggcaagtgggtggctgagattcgtgagcctaacaaacgctcacggctttggcttggctcttacacaaccgatatcgccgccgctagagcctacgacgtggccgtcttctacctccgtggcccctccgcacgtctcaacttccctgatcttctcttgcaagaagaggaccatctctcagccgccaccaccgctgacatgcccgcagctcttataagggaaaaagcggcggaggtcggcgccagagtcgacgctcttctagcttctgccgctccttcgatggctcactccactccgccggtaataaaacccgacttgaatcaaatacccgaatccggagatatatagtcaatttatatacatgtagtttgttttgtttgattagaagattacatttacatacaagatacacatagatactggaaaatataggtatgtatacattcataaattatcttatgtatcaaagaattttatagattctgattagctttttgtttttgtttttgataagaactctgattagttgtccggagacaaaaccggctaagagcaatccatgagaagctagcgagtgttttttagttcaagttgtaatataaatgcatattaattctttagtaattttgt

SEQ ID NO: 38 - protein, 153 aa, Arabidopsis thaliana
  G3 Polypeptide (domain in AA coordinates: 28-95)
MEREQEESTMRKRRQPPQEEVPNHVATRKPYRGIRRRKWGKWVAEIREPNKRSRLWLGSYTTDIAAARAYDVAVFYLRGPSARLNFPDLLLQEEDHLSAATTADMPAALIREKAAEVGARVDALLASAAPSMAHSTPPVIKPDLNQIPESGDI

SEQ ID NO: 39 - DNA, 992 bp, Arabidopsis thaliana
  G464
ctctgctggtatcattggagtctagggttttgttattgacatgcgtggtgtgtcagaattggaggtggggaagagtaatcttccggcggagagtgagctggaattgggattagggctcagcctcggtggtggcgcgtggaaagagcgtgggaggattcttactgctaaggattttccttccgttgggtctaaacgctctgctgaatcttcctctcaccaaggagcttctcctcctcgttcaagtcaagtggtaggatggccaccaattgggttacacaggatgaacagtttggttaataaccaagctatgaaggcagcaagagcggaagaaggagacggggagaagaaagttgtgaagaatgatgagctcaaagatgtgtcaatgaaggtgaatccgaaagttcagggcttagggtttgttaaggtgaatatggatggagttggtataggcagaaaagtggatatgagagctcattcgtcttacgaaaacttggctcagacgcttgaggaaatgttctttggaatgacaggtactacttgtcgagaaaaggttaaacctttaaggcttttagatggatcatcagactttgtactcacttatgaagataaggaaggggattggatgcttgttggagatgttccatggagaatgtttatcaactcggtgaaaaggcttcggatcatgggaacctcagaagctagtggactagctccaagacgtcaagagcagaaggatagacaaagaaacaaccctgtttagcttcccttccaaagctggcattgtttatgtattgtttgaggtttgcaatttactcgatactttttgaagaaagtattttggagaatatggataaaagcatgcagaagcttagatatgatttgaatccggttttcggatatggttttgcttaggtcattcaattcgtagttttccagtttgtttcttctttggctgtgtaccaattatctatgttctgtgagagaaagctctt

SEQ ID NO: 40 - protein, 239 aa, Arabidopsis thaliana
  G464 Polypeptide (domain in AA coordinates: 20-28, 71-82, 126-142, 187-224)
MRGVSELEVGKSNLPAESELELGLGLSLGGGAWKERGRILTAKDFPSVGSKRSAESSSHQGASPPRSSQVVGWPPIGLHRMNSLVNNQAMKAARAEEGDGEKKVVKNDELKDVSMKVNPKVQGLGFVKVNMDGVGIGRKVDMRAHSSYENLAQTLEEMFFGMTGTTCREKVKPLRLLDGSSDFVLTYEDKEGDWMLVGDVPWRMFINSVKRLRIMGTSEASGLAPRRQEQKDRQRNNPV

SEQ ID NO: 41 - DNA, 228 bp, Arabidopsis thaliana
  G682
atggataaccatcgcaggactaagcaacccaagaccaactccatcgttacttcttcttctgaagaagtgagtagtcttgagtgggaagttgtgaacatgagtcaagaagaagaagatttggtctctcgaatgcataagcttgtcggtgacaggtgggaactgatagctgggaggatcccaggaagaaccgctggagaaattgagaggttttgggtcatgaaaaattga

SEQ ID NO: 42 - protein, 75 aa, Arabidopsis thaliana
  G682 Polypeptide (domain in AA coordinates 27-63)
MDNHRRTKQPKTNSIVTSSSEEVSSLEWEVVNMSQEEEDLVSRMHKLVGDRWELIAGRIPGRTAGEIERFWVMKN

SEQ ID NO: 43 - DNA, 1221 bp, Arabidopsis thaliana
  G964
atttctcttccacaaagagtcctaacttcgagttgaaacaaacaccatttctcatctctatctcagaaagaacaaaccatttcgtgttctttctttctctattctcataaggaaatataattcctgaaactgttgagttcttgtgaaaggaaataaaaaacatgatgatgggcaaagaagatctaggtttgagcctaagcttagggttttcacaaaatcacaatcctcttcagatgaatctgaatcctaactcttcattatcaaacaatctccagagactcccatggaaccaaacattcgatcctacatcagatcttcgcaagatagacgtgaacagttttccatcaacggttaactgcgaggaagacacaggagtttcgtcaccaaacagtacgatctcaagcaccattagcgggaagagaagtgagagagaaggaatctccggaaccggcgttggctccggcgacgatcacgacgagatcactccggatcgagggtactcacgtggaacctcagatgaagaagaagacgggggcgaaacgtcgaggaagaagctcaggttatcaaaagatcagtctgcttttctcgaagagactttcaaagaacacaacactctcaatcccaaacagaagctagctttggctaagaagctgaacttgacggcaagacaagtggaagtgtggttccaaaacagaagagctagaaccaagttaaagcaaacggaggtagattgcgaatacttgaaacggtgcgtagagaagctaacggaagagaaccggagacttcagaaagaggctatggagcttcgaactctcaagctgtctccacaattctacggtcagatgactccaccaactacactcatcatgtgtccttcgtgcgagcgtgtagctggtccatcatcatcgaaccatcaccacaatcacaggccggtttcgattaacccgtggattgcttgtgctggtcaggtggctcatgggctgaattttgaagccttgcgtccacgatcgtaatttttagtggtgggggaagggtgttttgggttttttcattatcgttatatagtctatctgtgtggggtcattgtaattttggatgattggccttctcatgaactagtcatatgtatgatgcaaccttaaaaatatttcaagtagcaaaacttaattacaaacttgctatattaaccaaaaattatgaaaaaaaaaaaaaaaaaaaaaa

SEQ ID NO: 44 - protein, 283 aa, Arabidopsis thaliana
  G964 Polypeptide (domain in AA coordinates: 126-186)
MMMGKEDLGLSLSLGFSQNHNPLQMNLNPNSSLSNNLQRLPWNQTFDPTSDLRKIDVNSFPSTVNCEEDTGVSSPNSTISSTISGKRSEREGISGTGVGSGDDHDEITPDRGYSRGTSDEEEDGGETSRKKLRLSKDQSAFLEETFKEHNTLNPKQKLALAKKLNLTARQVEVWFQNRRARTKLKQTEVDCEYLKRCVEKLTEENRRLQKEAMELRTLKLSPQFYGQMTPPTTLIMCPSCERVAGPSSSNHHHNHRPVSINPWIACAGQVAHGLNFEALRPRS

SEQ ID NO: 45 - DNA, 696 bp, Arabidopsis thaliana
  G1792
aatccatagatctcttattaaataacagtgctgaccaagctcttacaaagcaaaccaatctagaacaccaaagttaatggagagctcaaacaggagcagcaacaaccaatcacaagatgacaagcaagctcgtttccggggagttcgaagaaggccttggggaaagtttgcagcagagattcgagacccgtcgagaaacggtgcccgtctttggctcgggacatttgagaccgctgaggaggcagcaagggcttatgaccgagcagcctttaaccttaggggtcatctcgctatactcaacttccctaatgagtattatccacgtatggacgactactcgcttcgccctccttatgcttcttcttcttcgtcgtcgtcatcgggttcaacttctactaatgtgagtcgacaaaaccaaagagaagttttcgagtttgagtatttggacgataaggttcttgaagaacttcttgattcagaagaaaggaagagataatcacgattagttttgttttgatattttatgtggcactgttgtggctacctacgtgcattatgtgcatgtataggtcgcttgattagtactttataacatgcatgccacgaccataaattgtaagagaagacgtactttgcgttttcatgaaatatgaatgttagatggtttgagtacaaaaaaaaaaaaaaaaaaaaaaa

SEQ ID NO: 46 - protein, 139 aa, Arabidopsis thaliana
  G1792 Polypeptide (domain in aa coordinates: 17-85)
MESSNRSSNNQSQDDKQARFRGVRRRPWGKFAAEIRDPSRNGARLWLGTFETAEEAARAYDRAAFNLRGHLAILNFPNEYYPRMDDYSLRPPYASSSSSSSSGSTSTNVSRQNQREVFEFEYLDDKVLEELLDSEERKR

SEQ ID NO: 47 - DNA, 1562 bp, Arabidopsis thaliana
  G1794
tctttctttcttcctctttgtctctgtttcttgtttctctctctctctctctacagagttttctttccctcgaagaaaaagaatatttttaaatttaattttctctgcgtttataagctttaagtttcagaggaggaggatttagaaggagggttttgtatgtgtgtcttaaaagtggcaaatcaggaagataacgttggcaaaaaagccgagtctattagagacgatgatcatcggacgttatctgaaatcgatcaatggctttacttattcgcagccgaagacgaccaccaccgtcatagcttccctacgcagcagccgcctccatcgtcgtcgtcctcatctcttatctcaggtttcagtagagagatggagatgtctgctattgtctctgctttgactcacgttgttgctggaaatgttcctcagcatcaacaaggaggcggtgaaggtagcggagaagggacttcgaattcgtcttcttcctcggggcagaaaaggaggagagaggtggaggaaggtggcgccaaagcggttaaggcagctaatactttgacggttgatcaatatttctccggtggtagctctacttctaaagtgagagaagcttcgagtaacatgtcaggtccgggcccaacatacgagtatacaactacggcaactgctagtagcgaaacgtcgtcgtttagtggggaccaacctcggcgaagatacagaggagttagacaaagaccatggggaaagtgggcggctgagattcgagatccatttaaagcagctagagtttggctcggtacgttcgacaatgctgaatcagcagcaagagcttacgacgaagctgcacttcggtttagaggcaacaaagccaaactcaacttccctgaaaacgtcaaactcgttagacctgcttcaaccgaagcacaacctgtgcaccaaaccgctgctcaaagaccgacccagtcaaggaactcgggttcaacgactacccttttgcccataagacctgcttcgaatcaaagcgttcattcgcagccgttgatgcaatcatacaacttgagttactctgaaatggctcgtcaacaacaacagtttcagcaacatcatcaacaatctttggatttatacgatcaaatgtcgtttccgttgcgtttcggtcacactggaggttcaatgatgcaatctacgtcgtcatcatcatctcattctcgtcctctgttttccccggctgctgttcagccgccaccagaatcagctagcgaaaccggttatctccaggatatacaatggccatcagacaagactagtaataactacaataatagtccatcctcctgatgacttgcttcattttatttgtttcactatagagtaatagaaaacaggaaaatgattatatgttatagagttatttttccaaatattatagggtttaggttgtttgtattgttctgctttcatcctctcatgctttttttcttaatttattatatttttgcattataatttcgtttcattgtaacaaacattaaaaagaccacatggagaaaggaaaaaaaagagag

SEQ ID NO: 48 - protein, 391 aa, Arabidopsis thaliana
  G1794 Polypeptide (domain in AA coordinates: 182-248)
MCVLKVANQEDNVGKKAESIRDDDHRTLSEIDQWLYLFAAEDDHHRHSFPTQQPPPSSSSSSLISGFSREMEMSAIVSALTHVVAGNVPQHQQGGGEGSGEGTSNSSSSSGQKRRREVEEGGAKAVKAANTLTVDQYFSGGSSTSKVREASSNMSGPGPTYEYTTTATASSETSSFSGDQPRRRYRGVRQRPWGKWAAEIRDPFKAARVWLGTFDNAESAARAYDEAALRFRGNKAKLNFPENVKLVRPASTEAQPVHQTAAQRPTQSRNSGSTTTLLPIRPASNQSVHSQPLMQSYNLSYSEMARQQQQFQQHHQQSLDLYDQMSFPLRFGHTGGSMMQSTSSSSSHSRPLFSPAAVQPPPESASETGYLQDIQWPSDKTSNNYNNSPSS

SEQ ID NO: 49 - DNA, 1605 bp, Arabidopsis thaliana
  G1946
tctcacctattgtaaaaatcaccagtttcgtatataaaaccctaattttctcaaaattcccaaatattgacttggaatcaaaaatccgaatggatgtgagcaaagtaaccacaagcgacggcggaggagattcaatggagactaagccatctcctcaacctcagcctgcggcgattctaagttcaaacgcgcctcctccgtttctgagcaagacctatgatatggttgatgatcacaatacagattcgattgtctcttggagtgctaataacaacagttttatcgtttggaaaccaccggagttcgctcgcgatcttcttcctaagaactttaagcataataatttctccagcttcgttagacagcttaatacctatggtttcaggaaggttgacccagatagatgggaatttgcgaatgaaggttttttaagaggtcagaagcacttgctacaatcaataactaggcgaaaacctgcccatggacagggacagggacatcagcgatctcagcactcgaatggacagaactcatctgttagcgcatgtgttgaagttggcaaatttggtctcgaagaagaagttgaaaggcttaaaagagataagaacgtccttatgcaagaactcgtcagattaagacagcagcaacagtccactgataaccaacttcaaacgatggttcagcgtctccagggcatggagaatcggcaacaacaattaatgtcattccttgcaaaggcagtacaaagccctcattttctatctcaattcttacagcagcagaatcagcaaaacgagagtaataggcgcatcagtgataccagtaagaagcggagattcaagcgagacggcattgtccgtaataatgattctgctactcctgatggacagatagtgaagtatcaacctccaatgcacgagcaagccaaagcaatgtttaaacagcttatgaagatggaaccttacaaaaccggcgatgatggtttccttctaggtaatggtacgtctactaccgagggaacagagatggagacttcatcaaaccaagtatcgggtataactcttaaggaaatgcctacagcttctgagatacagtcatcatcaccaattgaaacaactcctgaaaatgtttcggcagcatcagaagcaaccgagaactgtattccttcacctgatgatctaactcttcccgacttcactcatatgctaccggaaaataattcagagaagcctccagagagtttcatggaaccaaacctgggaggttctagtccattactagatccagatctgttgatcgatgattctttgtccttcgacattgacgactttccaatggattctgatatagaccctgttgattacggtttactcgaacgcttactcatgtcaagcccggttccagataatatggattcaacaccagtggacaatgaaacagagcaggaacaaaatggatgggacaaaactaagcatatggataatctgactcaacagatgggtctcctctctcctgaaaccttagatctctcaaggcaaaatccttgattttgggagtttttaaagtcttttgaggtaacacagtccctgagagcagcatattcat

SEQ ID NO: 50 - protein, 485 aa, Arabidopsis thaliana
  G1946 Polypeptide (domain in AA coordinates: 32-130)
MDVSKVTTSDGGGDSMETKPSPQPQPAAILSSNAPPPFLSKTYDMVDDHNTDSIVSWSANNNSFIVWKPPEFARDLLPKNFKHNNFSSFVRQLNTYGFRKVDPDRWEFANEGFLRGQKHLLQSITRRKPAHGQGQGHQRSQHSNGQNSSVSACVEVGKFGLEEEVERLKRDKNVLMQELVRLRQQQQSTDNQLQTMVQRLQGMENRQQQLMSFLAKAVQSPHFLSQFLQQQNQQNESNRRISDTSKKRRFKRDGIVRNNDSATPDGQIVKYQPPMHEQAKAMFKQLMKMEPYKTGDDGFLLGNGTSTTEGTEMETSSNQVSGITLKEMPTASEIQSSSPIETTPENVSAASEATENCIPSPDDLTLPDFTHMLPENNSEKPPESFMEPNLGGSSPLLDPDLLIDDSLSFDIDDFPMDSDIDPVDYGLLERLLMSSPVPDNMDSTPVDNETEQEQNGWDKTKHMDNLTQQMGLLSPETLDLSRQNP

SEQ ID NO: 51 - DNA, 584 bp, Arabidopsis thaliana
  G225
ctctctctctcactcttttcttttccgagaacccaacaaaaaaaaagctactattaatccttcccctcgtgaggaaatcatttcttcttgtttctcgagatttattctctttctctctctctttctctgtgtgtttcgtgtcttcagattagttcgatgtttcgttcagacaaggcggaaaaaatggataaacgacgacggagacagagcaaagccaaggcttcttgttccgaagaggtgagtagtatcgaatgggaagctgtgaagatgtcagaagaagaagaagatctcatttctcggatgtataaactcgttggcgacaggtgggagttgatcgccggaaggatcccgggacggacgccggaggagatagagagatattggcttatgaaacacggcgtcgtttttgccaacagacgaagagacttttttaggaaatgattttttttgtttggattaaaagaaaattttcctctccttaattcacaagacaagaaaaaaaggaaatgtacctgtccttgaattactattttggaatgtataattatctatatatataagaagaaaaaattgcttaggaattt

SEQ ID NO: 52 - protein, 94 aa, Arabidopsis thaliana
  G225 Polypeptide (domain in AA coordinates: 39-76)
MFRSDKAEKMDKRRRRQSKAKASCSEEVSSIEWEAVKMSEEEEDLISRMYKLVGDRWELIAGRIPGRTPEEIERYWLMKHGVVFANRRRDFFRK

SEQ ID NO: 53 - DNA, 407 bp, Arabidopsis thaliana
  G226
ccagtagttatggataataccaaccgtcttcgtcttcgtcgcggtcccagtcttaggcaaactaagttcactcgatcccgatatgactctgaagaagtgagtagcatcgaatgggagtttatcagtatgaccgaacaagaagaagatctcatctctcgaatgtacagacttgtcggtaataggtgggatttaatagcaggaagagtcgtaggaagaaaggcaaatgagattgagagatactggattatgagaaactctgactatttttctcacaaacgacgacgtcttaataattctccctttttttctacttctcctcttaatctccaagaaaatctaaaattgtaaagaaatcaaaataaaagctttcaatcataaaagtagaacaaatcttgaatgtcttctca

SEQ ID NO: 54 - protein, 112 aa, Arabidopsis thaliana
  G226 Polypeptide (domain in AA coordinates: 28-78)
MDNTNRLRLRRGPSLRQTKFTRSRYDSEEVSSIEWEFISMTEQEEDLISRMYRLVGNRWDLIAGRVVGRKANEIERYWIMRNSDYFSHKRRRLNNSPFFSTSPLNLQENLKL

SEQ ID NO: 55 - DNA, 2405 bp, Arabidopsis thaliana
  G419
aagccacacaatctcttttcttctctctctctctgttatatctcttctgtttaattcttttattcttcttcgtctatcttctcctataatctcttctctctccctcttcacctaaagaataagaagaaaaataattcacatctttatgcaaactactttcttgtagggttttaggagctatctctattgtcttggttctgatacaaagttttgtaattttcatggtatgagaagatttgcctttctattttgtttattggttctttttaactttttcttggagatgggttcttgtagatcttaatgaaacttctgtttttgtcccaaaaagagttttcttttttcttctcttctttttgggttttcaattcttgagagacatggcaagagatcagttctatggtcacaataaccatcatcatcaagagcaacaacatcaaatgattaatcagatccaagggtttgatgagacaaaccaaaacccaaccgatcatcatcattacaatcatcagatctttggctcaaactccaacatgggtatgatgatagacttctctaagcaacaacagattaggatgacaagtggttcggatcatcatcatcatcatcatcagacaagtggtggtactgatcagaatcagcttctggaagattcttcatctgccatgagactatgcaatgttaataatgatttcccaagtgaagtaaatgatgagagaccaccacaaagaccaagccaaggtctttccctttctctctcctcttcaaatcctacaagcatcagtctccaatctttcgaactcagaccccaacaacaacaacaagggtattccggtaataaatcaacacaacatcagaatctccaacacacgcagatgatgatgatgatgatgaatagtcaccaccaaaacaacaacaataacaatcatcagcatcataatcatcatcagtttcagattgggagttccaagtatttgagtccagctcaagagctactgagtgagttttgcagtcttggagtaaaggaaagcgatgaagaagtgatgatgatgaagcataagaagaagcaaaagggtaaacaacaagaagagtgggacacaagtcaccacagcaacaatgatcaacatgaccaatctgcgactacttcttcaaagaaacatgttccaccacttcactctcttgagttcatggaacttcagaaaagaaaagccaagttgctctccatgctcgaagagcttaaaagaagatatggacattaccgagagcaaatgagagttgcggcggcagcctttgaagcggcggttggactaggaggggcagagatatacactgcgttagcgtcaagggcaatgtcaagacactttcggtgtttaaaagacggacttgtgggacagattcaagcaacaagtcaagctttgggagagagagaagaggataatcgtgcggtttctattgcagcacgtggagaaactccacggttgagattgctcgatcaagctttgcggcaacagaaatcgtatcgccaaatgactcttgttgacgctcatccttggcgtccacaacgcggcttgcctgaacgcgcagtcacaacgttgagagcttggctctttgaacactttcttcacccatatccgagcgatgttgataagcatatattggcccgacaaactggtttatcaagaagtcaggtatcaaattggtttattaatgcaagagttaggctatggaaaccaatgattgaagaaatgtactgtgaagaaacaagaagtgaacaaatggagattacaaacccgatgatgatcgatactaaaccggacccggaccagttgatccgtgtcgaaccggaatctttatcctcaatagtgacaaaccctacatccaaatccggtcacaactcaacccatggaacgatgtcgttagggtcaacgtttgacttttccttgtacggtaaccaagctgtgacatacgctggtgaaggagggccacgtggtgacgtttccttgacgcttgggttacaacgtaacgatggtaacggtggtgtgagtttagcgttgtctccagtgacggctcaaggtggccaacttttctacggtagagaccacattgaagaaggaccggttcaatattcagcgtcgatgttagatgatgatcaagttcagaatttgccttataggaatttgatgggagctcaattacttcatgatattgtttgagattaaaagattaggaccaaagttatcgatacatattttccaaaaccgattcggttatgtaacggtttagttagataaaaaccaaattagatatttatatataccgttgtctgattggattggaggattggtggacaaggagatattattaatgtatgagttagttggttcgtcaaaaaaaaaaaaaaaaaa

SEQ ID NO: 56 - protein, 610 aa, Arabidopsis thaliana
  G419 Polypeptide (domain in AA coordinates: 392-452)
MARDQFYGHNNHHHQEQQHQMINQIQGFDETNQNPTDHHHYNHQIFGSNSNMGMMIDFSKQQQIRMTSGSDHHHHHHQTSGGTDQNQLLEDSSSAMRLCNVNNDFPSEVNDERPPQRPSQGLSLSLSSSNPTSISLQSFELRPQQQQQGYSGNKSTQHQNLQHTQMMMMMMNSHHQNNNNNNHQHHNHHQFQIGSSKYLSPAQELLSEFCSLGVKESDEEVMMMKHKKKQKGKQQEEWDTSHHSNNDQHDQSATTSSKKHVPPLHSLEFMELQKRKAKLLSMLEELKRRYGHYREQMRVAAAAFEAAVGLGGAEIYTALASRAMSRHFRCLKDGLVGQIQATSQALGEREEDNRAVSIAARGETPRLRLLDQALRQQKSYRQMTLVDAHPWRPQRGLPERAVTTLRAWLFEHFLHPYPSDVDKHILARQTGLSRSQVSNWFINARVRLWKPMIEEMYCEETRSEQMEITNPMMIDTKPDPDQLIRVEPESLSSIVTNPTSKSGHNSTHGTMSLGSTFDFSLYGNQAVTYAGEGGPRGDVSLTLGLQRNDGNGGVSLALSPVTAQGGQLFYGRDHIEEGPVQYSASMLDDDQVQNLPYRNLMGAQLLHDIV

SEQ ID NO: 57 - DNA, 890 bp, Arabidopsis thaliana
  G545
gcaaccttcaaactaaaactcgagagacaagaaatcctcagaatctttaacttaatggcgctcgaggctcttacatcaccaagattagcttctccgattcctcctttgttcgaagattcttcagtcttccatggagtcgagcactggacaaagggtaagcgatctaagagatcaagatccgatttccaccaccaaaacctcactgaggaagagtatctagctttttgcctcatgcttctcgctcgcgacaaccgtcagcctcctcctcctccggcggtggagaagttgagctacaagtgtagcgtctgcgacaagacgttctcttcttaccaagctctcggtggtcacaaggcaagccaccgtaagaacttatcacagactctctccggcggaggagatgatcattcaacctcgtcggcgacaaccacatccgccgtgactactggaagtgggaaatcacacgtttgcaccatctgtaacaagtcttttccttccggtcaagctctcggcggacacaagcggtgccactacgaaggaaacaacaacatcaacactagtagcgtgtccaactccgaaggtgcggggtccactagccacgttagcagtagccaccgtgggtttgacctcaacatccctccgatccctgaattctcgatggtcaacggagacgacgaagtcatgagccctatgccggcgaagaagcctcggtttgactttccggtcaaacttcaactttaaggaaatttacttagacgataagatttcgtttgtatactgttgagagttgtgtaggaatttgttgactgtacataccaaattggactttgactgattccaattcttcttgttctttcattttaaaaattattaaaccgattctttaccacaaa

SEQ ID NO: 58 - protein, 227 aa, Arabidopsis thaliana
  G545 Polypeptide (domain in AA coordinates: 82-102, 136-154)
MALEALTSPRLASPIPPLFEDSSVFHGVEHWTKGKRSKRSRSDFHHQNLTEEEYLAFCLMLLARDNRQPPPPPAVEKLSYKCSVCDKTFSSYQALGGHKASHRKNLSQTLSGGGDDHSTSSATTTSAVTTGSGKSHVCTICNKSFPSGQALGGHKRCHYEGNNNINTSSVSNSEGAGSTSHVSSSHRGFDLNIPPIPEFSMVNGDDEVMSPMPAKKPRFDFPVKLQL

SEQ ID NO: 59 - DNA, 1413 bp, Arabidopsis thaliana
  G561
aatttgtttttttttcttttgtgggttcaattcgaattgttttccctgagactcaagttactgtgtcattactctgcattgagcaatgggtagcaacgaagaaggaaaccccactaacaactctgataagccatcgcaagctgctgctcctgagcagagtaatgttcatgtgtatcatcatgactgggctgctatgcaggcatattatgggcctagagttggtatacctcaatattacaactcaaatttggcgcctggtcatgctccaccgccttatatgtgggcgtctccatcgccaatgatggctccttatggagcaccatatccaccattttgccctcctggtggagtttatgctcatcctggtgttcaaatgggctcacaaccacaaggtcctgtttctcaatcagcatctggagttacaacccctttgaccattgatgcaccagctaattcagctggaaactcagatcatgggttcatgaaaaagctgaaagagttcgatggacttgcaatgtcaataagcaataacaaagttgggagtgctgaacatagcagcagtgaacataggagttctcagagctccgagaatgatggctctagcaatggtagtgatggtaatacaactgggggagaacaatctaggaggaaaagaaggcaacaaagatcaccaagcactggtgaaagaccctcatctcaaaacagtctgcctcttagaggtgaaaatgagaaacccgatgtgactatggggactcctgttatgcccacagcaatgagtttccaaaactctgctggcatgaacggtgtgccacagccatggaatgaaaaagaggttaaacgagagaagagaaaacagtcaaaccgagaatctgctaggaggtcaagactgaggaagcaggctgaaacagaacaactatctgtcaaagttgacgcattagtagctgagaacatgtctctgaggtctaaactaggccagctaaacaatgagtctgagaaactacggctggagaacgaagctatattggatcaactgaaagcgcaagcaacagggaaaacagagaacctgatctctcgagttgataagaacaactctgtatcaggtagcaaaactgtgcagcatcaactgttaaatgcaagtccgataaccgatcctgtcgcggctagctgaccgtggccgcaacaatgagaacccgatatttcttcctttgggttgtgattgtaacttaaaaggagactttttgtttttattcttagatttgtagctctctgcatagtgagcataaattgatgtaatatggtttaagagattcggtgttctctggtgtgtgctgcaaccacataattggtgatagataggtttagttatataagcaaatgtattagagataaggggagacatatttgatggtcttt

SEQ ID NO: 60 - protein, 360 aa, Arabidopsis thaliana
  G561 Polypeptide (domain in AA coordinates: 248-308)
MGSNEEGNPTNNSDKPSQAAAPEQSNVHVYHHDWAAMQAYYGPRVGIPQYYNSNLAPGHAPPPYMWASPSPMMAPYGAPYPPFCPPGGVYAHPGVQMGSQPQGPVSQSASGVTTPLTIDAPANSAGNSDHGFMKKLKEFDGLAMSISNNKVGSAEHSSSEHRSSQSSENDGSSNGSDGNTTGGEQSRRKRRQQRSPSTGERPSSQNSLPLRGENEKPDVTMGTPVMPTAMSFQNSAGMNGVPQPWNEKEVKREKRKQSNRESARRSRLRKQAETEQLSVKVDALVAENMSLRSKLGQLNNESEKLRLENEAILDQLKAQATGKTENLISRVDKNNSVSGSKTVQHQLLNASPITDPVAAS

SEQ ID NO: 61 - DNA, 480 bp, Arabidopsis thaliana
  G911
atgggtcttcctgaagatttcatcaccgagcttcagattccaggttacatattaaagatactttacgtcatcggtttctttagagacatggtcgatgctctttgtccttacattggtctacctagttttctagaccacaacgagacctctggacccgatccgacccgacacgctctctctacgtcagcgagtcttgctaacgagttgatcccggtggttcggttctcggatcttccgaccgatccggaagattgttgtacggtttgtttgtcagattttgagtccgacgataaggttaggcagctacccaagtgtggacacgtgtttcatcatcattgtttagaccgttggatcgttgactacaacaagatgaaatgtccggtttgtcggcaccggttcttaccgaaagaaaagtacacgcaatgtgattggggttctggttcagattggtttagtgatgaagtggaaagtaccaactaa

SEQ ID NO: 62 - protein, 159 aa, Arabidopsis thaliana
  G911 Polypeptide (domain in AA coordinates: 86-129)
MGLPEDFITELQIPGYILKILYVIGFFRDMVDALCPYIGLPSFLDHNETSGPDPTRHALSTSASLANELIPVVRFSDLPTDPEDCCTVCLSDFESDDKVRQLPKCGHVFHHHCLDRWIVDYNKMKCPVCRHRFLPKEKYTQCDWGSGSDWFSDEVESTN

SEQ ID NO: 63 - DNA, 1116 bp, Arabidopsis thaliana
  G1069
ttggaaccctagaggcctttcaagcaaatcatcagggtaacaatttcttgatctttctttttagcgaatttccagtttttggtcaatcatggcaaacccttggtggacgaaccagagtggtttagcgggcatggtggaccattcggtctcctcaggccatcaccaaaaccatcaccaccaaagtcttcttaccaaaggagatcttggaatagccatgaatcagagccaagacaacgaccaagacgaagaagatgatcctagagaaggagccgttgaggtggtcaaccgtagaccaagaggtagaccaccaggatccaaaaacaaacccaaagctccaatctttgtgacaagagacagccccaacgcactccgtagccatgtcttggagatctccgacggcagtgacgtcgccgacacaatcgctcacttctcaagacgcaggcaacgcggcgtttgcgttctcagcgggacaggctcagtcgctaacgtcaccctccgccaagccgccgcaccaggaggtgtggtctctctccaaggcaggtttgaaatcttatctttaaccggtgctttcctccctggaccttccccacccgggtcaaccggtttaacggtttacttagccggggtccagggtcaggtcgttggaggtagcgttgtaggcccactcttagccatagggtcggtcatggtgattgctgctactttctctaacgctacttatgagagattgcccatggaagaagaggaagacggtggcggctcaagacagattcacggaggcggtgactcaccgcccagaatcggtagtaacctgcctgatctatcagggatggccgggccaggctacaatatgccgccgcatctgattccaaatggggctggtcagctagggcacgaaccatatacatgggtccacgcaagaccaccttactgactcagtgagccatttctatatataatggtctatataaataaatatatagatgaatataagcaagcaatttgaggtagtctattacaaagcttttgctctggttggaaaaataaataagtatcaaagctttgtttgttcttaatggaaatatagagcttgggaaggtagaaagagacgacatt

SEQ ID NO: 64 - protein, 281 aa, Arabidopsis thaliana
  G1069 Polypeptide (domains in AA coordinates: 67-75, 141-185, DUF296:94-211)
MANPWWTNQSGLAGMVDHSVSSGHHQNHHHQSLLTKGDLGIAMNQSQDNDQDEEDDPREGAVEVVNRRPRGRPPGSKNKPKAPIFVTRDSPNALRSHVLEISDGSDVADTIAHFSRRRQRGVCVLSGTGSVANVTLRQAAAPGGVVSLQGRFEILSLTGAFLPGPSPPGSTGLTVYLAGVQGQVVGGSVVGPLLAIGSVMVIAATFSNATYERLPMEEEEDGGGSRQIHGGGDSPPRIGSNLPDLSGMAGPGYNMPPHLIPNGAGQLGHEPYTWVHARPPY

SEQ ID NO: 65 - DNA, 2663 bp, Arabidopsis thaliana
  G1089
aagtaagagagcttcttaaggaagaagaagatgggttgtgctcaatcaaagatcgagaacgaagaagcagttactcgttgcaaagaacgaaaacaattgatgaaagacgccgtcactgctcgtaacgctttcgccgccgctcactcagcttacgctatggctcttaaaaacaccggagctgctctttccgattactctcacggcgagtttttagtctctaatcactcgtcttcctccgcagctgcagcaatcgcttctacttcttctcttcccactgctatatctcctcctcttccttcttccaccgctccggtttctaattcaaccgcttcttcttcctccgctgcggttcctcagccgattcctgatactcttcctcctcctcctcctccaccaccgcttcctcttcaacgtgctgctactatgccggagatgaacggtagatccggtggtggtcatgctggtagtggactcaacggaattgaagaagatggagccctagataacgatgatgatgacgatgatgatgatgatgactctgaaatggagaatcgtgatcgtttgattaggaaatcgagaagccgtggaggtagtactagaggaaataggacgacgattgaagatcatcatcttcaggaggagaaagctccgccacctccccctttggcgaattcgcggccaattccgccgccacgtcagcatcagcatcaacatcagcaacagcaacaacaacctttctacgattacttcttccctaatgttgagaatatgcctggaactactttagaagatactcctccacaaccacaaccacaaccaacaaggcctgtgcctcctcaaccacattcaccagtcgttactgaggatgacgaagatgaggaggaggaagaggaggaagaggaggaggaagaggagacggtgattgaacggaaaccactggtggaggaaagaccgaagagagtagaggaagtgacgattgaattggaaaaagttactaatttgagagggatgaagaagagtaaagggatagggattcccggagagaggagaggaatgcgaatgccggtgactgcgacgcatttggcgaatgtattcattgagcttgatgataatttcttgaaagcttctgaaagtgctcatgatgtttctaagatgcttgaagctactaggctccattaccattctaattttgcagataaccgaggacatattgatcactctgctagagtgatgcgtgtaattacatggaatagatcatttagaggaataccaaatgctgatgatgggaaagatgatgttgatttggaagagaatgaaactcatgctactgttcttgacaaattgctagcatgggaaaagaagctctatgacgaagtcaaggctggcgaactcatgaaaatcgagtaccagaaaaaggttgctcatttaaatcgggtgaagaaacgaggtggccactcggattcattagagagagctaaagcagcagtaagtcatttgcatacaagatatatagttgatatgcaatccatggactccacagtttcagaaatcaatcgtcttagggatgaacaactatacctaaagctcgttcaccttgttgaggcgatggggaagatgtgggaaatgatgcaaatacatcatcaaagacaagctgagatctcaaaggtgttgagatctctagatgtttcacaagcggtgaaagaaacaaatgatcatcatcacgaacgcaccatccagctcttggcagtggttcaagaatggcacacgcagttttgcaggatgatagatcatcagaaagaatacataaaagcacttggcggatggctaaagctaaatctcatccctatcgaaagcacactcaaggagaaagtatcttcgcctcctcgagttcccaatcccgcaatccaaaaactcctccacgcttggtatgaccgtttagacaaaatccccgacgaaatggctaaaagtgccataatcaatttcgcagcggttgtaagcacgataatgcagcagcaagaagacgagataagtctcagaaacaaatgcgaagagacaagaaaagaattgggaagaaaaattagacagtttgaggattggtaccacaaatacatccagaagagaggaccggaggggatgaatccggatgaagcggataacgatcataatgatgaggtcgctgtgaggcaattcaatgtagaacaaattaagaagaggttggaagaagaagaagaagcttaccatagacaaagccatcaagttagagagaagtcactggctagtcttcgaactcgcctccccgagctttttcaggcaatgtccgaggttgcgtattcatgttcggatatgtatagagctataacgtatgcgagtaagcggcaaagccaaagcgaacggcatcagaaacctagccagggacagagttcgtaagaactaatgtaagatcagagtaatgtcttcttcttctttgatcttgaatatttaagcacacacatacatacaacgtatagctaaatctttatcattgctttcttatattaaggttttggcttttgtaagaaggtttcttacatatgagattcatatagtgtttgattcttaaggaactgttctgttgagtaataagaaagttgtgtattgaaatagagttgcatttgttaattttg

SEQ ID NO: 66 - protein, 798 aa, Arabidopsis thaliana
  G1089 Polypeptide (domain in AA coordinates 425-500)
MGCAQSKIENEEAVTRCKERKQLMKDAVTARNAFAAAHSAYAMALKNTGAALSDYSHGEFLVSNHSSSSAAAAIASTSSLPTAISPPLPSSTAPVSNSTASSSSAAVPQPIPDTLPPPPPPPPLPLQRAATMPEMNGRSGGGHAGSGLNGIEEDGALDNDDDDDDDDDDSEMENRDRLIRKSRSRGGSTRGNRTTIEDHHLQEEKAPPPPPLANSRPIPPPRQHQHQHQQQQQQPFYDYFFPNVENMPGTTLEDTPPQPQPQPTRPVPPQPHSPVVTEDDEDEEEEEEEEEEEEETVIERKPLVEERPKRVEEVTIELEKVTNLRGMKKSKGIGIPGERRGMRMPVTATHLANVFIELDDNFLKASESAHDVSKMLEATRLHYHSNFADNRGHIDHSARVMRVITWNRSFRGIPNADDGKDDVDLEENETHATVLDKLLAWEKKLYDEVKAGELMKIEYQKKVAHLNRVKKRGGHSDSLERAKAAVSHLHTRYIVDMQSMDSTVSEINRLRDEQLYLKLVHLVEAMGKMWEMMQIHHQRQAEISKVLRSLDVSQAVKETNDHHHERTIQLLAVVQEWHTQFCRMIDHQKEYIKALGGWLKLNLIPIESTLKEKVSSPPRVPNPAIQKLLHAWYDRLDKIPDEMAKSAIINFAAVVSTIMQQQEDEISLRNKCEETRKELGRKIRQFEDWYHKYIQKRGPEGMNPDEADNDHNDEVAVRQFNVEQIKKRLEEEEEAYHRQSHQVREKSLASLRTRLPELFQAMSEVAYSCSDMYRAITYASKRQSQSERHQKPSQGQSS

SEQ ID NO: 67 - DNA, 1371 bp, Arabidopsis thaliana
  G1452
atttattaagcatcaatgagagaacttcagagctgggtttgagttctgtccaataatacataaccacgttatcatttttgtcctttactatctcattacactcttctgttattcgcccaattcttacagtcattactctctatagggctcgagcggccgcccgggcaggtttctatgcagatggttcacacttcccgctccattgcccagattgggttcggtgttaagtcgcaattagtactcactatagggctcgagcggccgcccgggcaggtaaaagatcaaacaatgtctaaagaagctgagatgtcgatcgcggtgtcggctttgttccctggttttagattctctcctactgatgttgaacttatctcgtactatcttcgtcgtaaaatcgatggtgatgagaactctgttgctgtgattgctgaggtcgagatttacaagttcgagccgtgggacttgccagaggaatcgaaactgaaatcggagaacgagtggttttacttctgcgcgagggggaggaagtacccgcacgggtcacaaagccggcgagccacacagctaggatattggaaagcgaccggtaaagagcggagtgttaaatccgggaaccaagttgttggaaccaagagaacgcttgtatttcatatcggtcgggctcctcgtggcgagagaacggagtggattatgcatgaatactgcatccatggagccccacaggatgcattagtggtgtgccggttaagaaaaaatgctgattttcgggctagttcgacccaaaaaattgaggatggtgttgtgcaagacgatggctacgttggccaaagaggtggtttggacaaggaggacaaatcctactatgaatctgagcatcagataccaaatggtgacatcgcagaatcatcaaatgttgttgaggatcaggccgataccgatgatgattgttacgccgagattctgaacgatgatataataaagctcgacgaagaagcgttgaaagctagccaagcgtttcgaccaactaatccaactcatcaagaaacaatatcaagcgagtcatcgagtaagaggtcaaaatgtggtataaaaaaagaatcaacggaaacaatgaattgttacgctttgttcaggatcaagaacgttgccggaaccgactccagctggagattcccgaacccgttcaaaatcaagaaagatgatagccagagattgatgaagaatgttctggccactactgttttcttggctatcttattttctttcttttggactgtattaatagctaggaactaaagctagttacgacatacatattatttatacataaataaatatagtattttgtctatggcaaaaaaaaaaaaaaaa

SEQ ID NO: 68 - protein, 373 aa, Arabidopsis thaliana
  G1452 Polypeptide (domain in AA coordinates: 30-177)
MQMVHTSRSIAQIGFGVKSQLVLTIGLERPPGQVKDQTMSKEAEMSIAVSALFPGFRFSPTDVELISYYLRRKIDGDENSVAVIAEVEIYKFEPWDLPEESKLKSENEWFYFCARGRKYPHGSQSRRATQLGYWKATGKERSVKSGNQVVGTKRTLVFHIGRAPRGERTEWIMHEYCIHGAPQDALVVCRLRKNADFRASSTQKIEDGVVQDDGYVGQRGGLDKEDKSYYESEHQIPNGDIAESSNVVEDQADTDDDCYAEILNDDIIKLDEEALKASQAFRPTNPTHQETISSESSSKRSKCGIKKESTETMNCYALFRIKNVAGTDSSWRFPNPFKIKKDDSQRLMKNVLATTVFLAILFSFFWTVLIARN

SEQ ID NO: 69 - DNA, 2217 bp, Arabidopsis thaliana
  misc_feature (2192)..(2192): n is a, c, g, or t
  G175
atttctaaaaatagttaaactgttggtgatttttgtggaactgattaattaacacaattggagaaaacaaattgaaacttttttgtttgttagagagttaaggagaaattttatctaaccaagctgtgtaaatctcttgtagtttttctgccgatatacattttcattgtgttgagggtaaacgataatcaagaacgagagagagagagagcaagagcaagagatttctactacagaagatttattatattgatcattttgtgtgatcaacccataaaaacagagagacatagacaagtccatgtttcgatgtttcgatctctcttactgtctaaacggcgaaataaaaagtctgatgggtgtcacttattgcatgtatattagtaaatcagcttgagcccaagttaaagctgaaacttgggtttgcaatggctggtattgataataaagctgctgtaatgggagaatggttcgactgtagtactactaaccacaggaagagatcgaaagcggaacttggtagagagttttctttaaattacatcaagaatgaggattctttgcaaaccacctttcaagaaagttcacgaggagctcttcgtgaaaggattgctgcgagatccgggtttaatgcaccgtggttaaacactgaggatattcttcagtcgaaatctttaaccatctcttctcctggtcttagtcctgcaactctgttagagtctcctgttttcctctcaaaccctttgctatctccaacaaccgggaagctctcatcagtaccttctgataaggctaaagctgagttatttgacgacattaccacatccttagccttccaaaccatttcaggaagtggccttgatcctactaacatcgctttagaacccgatgattcccaagactatgaagaaagacagctcggcggtttaggagactcgatggcttgttgtgcacctgcagatgatggatacaactggagaaaatatggacaaaagctagttaaaggaagtgagtatccgcggagctattacaagtgcacgcacccgaattgtgaggccaagaagaaggttgaacggtctcgggaaggtcatattatagagatcatatacacaggagatcatatacacagcaaacctccacctaaccgccggtcagggattggatcatccggtactggccaagacatgcaaatagatgcaaccgaatacgaaggttttgctggaaccaatgagaacatagaatggacatcacctgtatctgcagagctcgaatacggaagccattcaggatcaatgcaggttcaaaacgggactcatcagttcgggtatggtgatgcagcagctgatgccttatatagagatgaaaacgaagatgatcgcacgtcccacatgagtgtttccctgacttacgatggagaggtagaagagtccgaatcaaagagaaggaaactagaagcttatgcaacagaaacgagtggatcaaccagagccagccgtgagccaagagttgtggtgcagaccacaagtgacattgacatcctcgatgatggttatcgctggcgcaagtatgggcaaaaagtcgttaaaggaaacccgaatccaaggagctactataaatgcacagctaatggatgtaccgtaacgaagcatgtagagagagcctctgatgacttcaagagcgtactaacaacttatataggcaagcacacccacgttgtaccagcagcacgcaacagcagccacgtcggtgcaggcagttcagggactctccaaggcagtttagcgactcagacccacaaccacaatgtgcactatccaatgccacacagtagatctgagggactggccacagccaactcatctctatttgacttccagtcacacctgaggcatcctacaggtttctccgtttacataggccaatctgagctttctgatctttcaatgcctggtctaactattgggcaagagaagcttaccagcctgcaggcgcctgacattggggatccaactggcctaatgttgcagttagcagcacagccgaaggtggaaccagtgtcaccacaacagggacttgatttgtcagcgagctcattgatatgcagagagatgttgagtagattacgacagatatgaaacaaatctctttgttcactgattgctcaaatttttgaataaatgaaaaattgaganaaaaaaaaaaaaaaaaaaaaaaaaa

SEQ ID NO: 70 - protein, 568 aa, Arabidopsis thaliana
  G175 Polypeptide (domain in AA coordinates: 178-234, 372-428)
MAGIDNKAAVMGEWFDCSTTNHRKRSKAELGREFSLNYIKNEDSLQTTFQESSRGALRERIAARSGFNAPWLNTEDILQSKSLTISSPGLSPATLLESPVFLSNPLLSPTTGKLSSVPSDKAKAELFDDITTSLAFQTISGSGLDPTNIALEPDDSQDYEERQLGGLGDSMACCAPADDGYNWRKYGQKLVKGSEYPRSYYKCTHPNCEAKKKVERSREGHIIEIIYTGDHIHSKPPPNRRSGIGSSGTGQDMQIDATEYEGFAGTNENIEWTSPVSAELEYGSHSGSMQVQNGTHQFGYGDAAADALYRDENEDDRTSHMSVSLTYDGEVEESESKRRKLEAYATETSGSTRASREPRVVVQTTSDIDILDDGYRWRKYGQKVVKGNPNPRSYYKCTANGCTVTKHVERASDDFKSVLTTYIGKHTHVVPAARNSSHVGAGSSGTLQGSLATQTHNHNVHYPMPHSRSEGLATANSSLFDFQSHLRHPTGFSVYIGQSELSDLSMPGLTIGQEKLTSLQAPDIGDPTGLMLQLAAQPKVEPVSPQQGLDLSASSLICREMLSRLRQI

SEQ ID NO: 71 - DNA, 1927 bp, Arabidopsis thaliana
  G1852
catctgatctgctctcgaagacgaaagcttcgagtactggttgaagctaaagctatgggacacgtgaatctacctgcatcaaagcgtggtaaccctcgtcaatggcgtctcctcgacatcgtaaccgctgctttcttcggtatcgtacttctcttcttcatccttttattcactcctcttggtgattccatggcggcttctggtcggcaaacgctgcttctctctacggcgtcagatccgaggcaacggcagcgattagtgactttggttgaagctggtcagcatttgcaaccgatcgagtattgtcctgcggaagctgttgctcatatgccttgtgaggatccgagaaggaatagtcagcttagtagagagatgaatttctatagggagagacattgtcctttgcctgaggagactccgctctgtttgattcctccgccttctggttataaaattcctgttccgtggcctgagagtcttcacaagatttggcatgcaaacatgccatataacaaaattgctgaccggaaaggtcatcaaggatggatgaaaagggaaggggaatactttactttcccaggcggtggcacgatgtttcctggcggagctggccaatacattgaaaagcttgcacagtatattccgcttaatggtggaactttgagaactgctcttgacatgggatgcggggtagctagttttggaggtactctactatctcaaggcattctagccctctcatttgctccaagagattcacataaatctcaaattcagttcgctttggaaagaggagtgcctgcatttgttgccatgcttggcactcgtagactcccctttcctgcatactcctttgacctgatgcactgttcccgatgtttgattccttttacggcttacaatgcaacttacttcatcgaagtagataggttactgcgccctggaggatatcttgtaatctctggcccacctgtacaatggcctaaacaagacaaagaatgggctgatcttcaggcggtggctagagctttgtgctatgagctaattgcggttgatggaaacactgtcatctggaagaagcctgttggagattcatgtctacctagccagaatgagtttgggcttgagttgtgtgatgagtctgttccgccaagtgatgcatggtattttaaattgaagaggtgtgttaccaggccatcatccgtcaaaggagaacacgctttgggaactatatccaagtggccggagaggcttactaaagttccttctagggccattgtcatgaaaaacggattggatgtgtttgaagcagatgcaaggcggtgggcaagacgcgttgcttattacagggattctcttaacttgaagctgaaatctccaactgtccgcaatgtcatggacatgaacgcattcttcggaggctttgcagcaacccttgcatctgatcctgtgtgggttatgaatgtcattccagctcggaagccattaactcttgacgtgatttatgacagaggtctcatcggtgtttaccatgattggtgtgaaccattttcaacatatccccgcacgtatgatttcatccatgtatcaggaattgaatcactgataaaacgacaagactcaagcaaatcgaggtgtagcctagtagatctaatggtagagatggacagaatattacgtccagaaggaaaggttgtgatccgagactctcctgaggtgctagataaagtcgcacgaatggctcatgctgtaagatggtcttcttccatacacgagaaagaacctgaatcccatggaagagagaagattcttatcgcaaccaaatctctctggaaattgccatcaaactcccactgaagacacaaaagaagaagaaaagaagaagctcttctcaatcttgtaggtactgtcacttgctctccagccc

SEQ ID NO: 72 - protein, 600 aa, Arabidopsis thaliana
  G1852 Polypeptide (domain in AA coordinates: 1-601)
MGHVNLPASKRGNPRQWRLLDIVTAAFFGIVLLFFILLFTPLGDSMAASGRQTLLLSTASDPRQRQRLVTLVEAGQHLQPIEYCPAEAVAHMPCEDPRRNSQLSREMNFYRERHCPLPEETPLCLIPPPSGYKIPVPWPESLHKIWHANMPYNKIADRKGHQGWMKREGEYFTFPGGGTMFPGGAGQYIEKLAQYIPLNGGTLRTALDMGCGVASFGGTLLSQGILALSFAPRDSHKSQIQFALERGVPAFVAMLGTRRLPFPAYSFDLMHCSRCLIPFTAYNATYFIEVDRLLRPGGYLVISGPPVQWPKQDKEWADLQAVARALCYELIAVDGNTVIWKKPVGDSCLPSQNEFGLELCDESVPPSDAWYFKLKRCVTRPSSVKGEHALGTISKWPERLTKVPSRAIVMKNGLDVFEADARRWARRVAYYRDSLNLKLKSPTVRNVMDMNAFFGGFAATLASDPVWVMNVIPARKPLTLDVIYDRGLIGVYHDWCEPFSTYPRTYDFIHVSGIESLIKRQDSSKSRCSLVDLMVEMDRILRPEGKVVIRDSPEVLDKVARMAHAVRWSSSIHEKEPESHGREKILIATKSLWKLPSNSH

SEQ ID NO: 73 - DNA, 1322 bp, Arabidopsis thaliana
  G1863
gtcgacccattatccttaaagtaaccaacacttctctctctctttcttcaatggatttgcaactgaaacaatggagaagccagcagcagcaacaacatcagacagagtcagaagaacaaccttctgcagctaagataccaaaacatgtctttgaccagattcattctcacactgcaacttctactgctcttcctctctttacccctgagcctacttcttctaaactctcctctttgtctcctgattcttcctccaggttccccaagatggggagcttctttagctgggcacagtggcaagaacttgaactacaagctctgatctacaggtacatgttggctggtgctgctgttcctcaggagctccttttaccaatcaagaaaagccttctccatctatctccttcctactttcttcaccatcctcttcaacacctacctcattaccaacctgcttggtatttgggaagggcagcgatggatcctgagccaggcagatgcaggagaacggatggtaagaagtggagatgttcaagagacgtcttcgctggccacaagtattgcgagcgccacatgcaccgtggccgcaaccgttcaagaaagcctgtggaaactccaaccaccgtcaatgcaactgccacgtccatggcttcatcagtagcagccgcagccaccactacaacagcaacaacaacatctacgtttgcttttggtggtggtggtggtagtgaggaagtggttggtcaaggaggatctttcttcttctctggctcttctaactcttcatctgaacttctccaccttagtcaaagttgttcggagatgaagcaagaaagcaacaacatgaacaacaagaggccatacgagtcccacatcggattcagtaacaacagatcagatggaggacacatcctgaggcccttctttgacgattggcctcgttcttcgctccaagaagctgacaatagttcaagccccatgagctcagccacttgtctctccatctccatgcccgggaactcttcctcagacgtctctctgaagctgtccacaggcaacgaagagggagcccggagcaacaacaatgggagagatcagcaaaacatgagctggtggagcggtggaggttccaaccaccatcatcacaacatgggcggaccattggccgaagccctgagatcttcttcctcatcttccccaaccagtgttctccatcagcttggtgtctcgacacaagcctttcattgaccagtgtaaaaccaacacaacaatgcggtttttactgtgtttttggtttttatccaaatttcctgtataaagagg

SEQ ID NO: 74 - protein, 398 aa, Arabidopsis thaliana
  G1863 Polypeptide (domain in AA coordinates: 76-187)
MDLQLKQWRSQQQQQHQTESEEQPSAAKIPKHVFDQIHSHTATSTALPLFTPEPTSSKLSSLSPDSSSRFPKMGSFFSWAQWQELELQALIYRYMLAGAAVPQELLLPIKKSLLHLSPSYFLHHPLQHLPHYQPAWYLGRAAMDPEPGRCRRTDGKKWRCSRDVFAGHKYCERHMHRGRNRSRKPVETPTTVNATATSMASSVAAAATTTTATTTSTFAFGGGGGSEEVVGQGGSFFFSGSSNSSSELLHLSQSCSEMKQESNNMNNKRPYESHIGFSNNRSDGGHILRPFFDDWPRSSLQEADNSSSPMSSATCLSISMPGNSSSDVSLKLSTGNEEGARSNNNGRDQQNMSWWSGGGSNHHHHNMGGPLAEALRSSSSSSPTSVLHQLGVSTQAFH

SEQ ID NO: 75 - DNA, 1191 bp, Arabidopsis thaliana
  G188
ctctcaccaacataatcaaagaagctttcctcacgaattcaagatcgccatgtcctccgaggattgggatctcttcgccgtcgtcagaagctgcagctcttctgtttccaccaccaattcttgtgctggtcatgaagacgacataggaaactgtaaacaacaacaagatcctcctcctcctcctctgtttcaagcttcttcttcttgcaacgagttacaagattcttgcaaaccatttttacccgttactactactactactactacttggtctcctcctcctctacttcctcctcctaaagcctcatcaccatctcccaatatcttactaaaacaagaacaagtacttctcgaatcacaagatcaaaaacctcctcttagtgttagggttttcccaccatccacttcttcttctgtctttgtttttagaggtcaacgcgaccagcttcttcaacaacaatcccaacctccccttcgatctagaaaaagaaagaatcagcaaaaaagaaccatatgtcatgtaacgcaagagaatctttcttctgatttgtgggcttggcgtaaatacggtcaaaaacccatcaaaggctctccttatccaaggaattattacagatgtagtagctcaaaaggatgtttagcacgaaaacaagttgaaagaagtaatttagatcctaatatcttcatcgttacttacaccggagaacacactcatccacgtcctactcaccggaactctctcgccggaagtactcgtaacaaatctcagcccgttaacccggttcctaaaccggacacatctcctttatcggatacagtaaaagaagagattcatctttctccgacgacaccgttgaaaggaaacgatgacgttcaagaaacgaatggagatgaagatatggttggtcaagaagtcaacatggaagaggaagaggaggaagaagaagtggaagaagatgatgaagaagaagaagatgatgatgacgtggatgatcttttgataccaaatttagcggtgagagatcgagatgatttgttcttcgctggaagttttccatcttggtccgccggatccgccggtgacggtggtggatgatgaaaacgaataaaatctcaatttacaatttacaaaaagaaaaaagtcagtttttaattattatttttgtttgttaaaacttgacatttattgtg

SEQ ID NO: 76 - protein, 348 aa, Arabidopsis thaliana
  G188 Polypeptide (domain in AA coordinates: 175-222)
MSSEDWDLFAVVRSCSSSVSTTNSCAGHEDDIGNCKQQQDPPPPPLFQASSSCNELQDSCKPFLPVTTTTTTTWSPPPLLPPPKASSPSPNILLKQEQVLLESQDQKPPLSVRVFPPSTSSSVFVFRGQRDQLLQQQSQPPLRSRKRKNQQKRTICHVTQENLSSDLWAWRKYGQKPIKGSPYPRNYYRCSSSKGCLARKQVERSNLDPNIFIVTYTGEHTHPRPTHRNSLAGSTRNKSQPVNPVPKPDTSPLSDTVKEEIHLSPTTPLKGNDDVQETNGDEDMVGQEVNMEEEEEEEEVEEDDEEEEDDDDVDDLLIPNLAVRDRDDLFFAGSFPSWSAGSAGDGGG

SEQ ID NO: 77 - DNA, 1155 bp, Arabidopsis thaliana
  G1930
attcacattactaatctctcaagatttcacaattttcttgtgattttctctcagtttcttatttcgtttcataacatggatgccatgagtagcgtagacgagagctctacaactacagattccattccggcgagaaagtcatcgtctccggcgagtttactatatagaatgggaagcggaacaagcgtggtacttgattcagagaacggtgtcgaagtcgaagtcgaagccgaatcaagaaagcttccttcttcaagattcaaaggtgttgttcctcaaccaaatggaagatggggagctcagatttacgagaaacatcaacgcgtgtggcttggtactttcaacgaggaagacgaagcagctcgtgcttacgacgtcgcggctcaccgtttccgtggccgcgatgccgttactaatttcaaagacacgacgttcgaagaagaggttgagttcttaaacgcgcattcgaaatcagagatcgtagatatgttgagaaaacacacttacaaagaagagttagaccaaaggaaacgtaaccgtgacggtaacggaaaagagacgacggcgtttgctttggcttcgatggtggttatgacggggtttaaaacggcggagttactgtttgagaaaacggtaacgccaagtgacgtcgggaaactaaaccgtttagttataccaaaacaccaagcggagaaacattttccgttaccgttaggtaataataacgtctccgttaaaggtatgctgttgaatttcgaagacgttaacgggaaagtgtggaggttccgttactcttattggaatagtagtcaaagttatgtgttgaccaaaggttggagtagattcgttaaagagaagagactttgtgctggtgatttgatcagttttaaaagatccaacgatcaagatcaaaaattctttatcgggtggaaatcgaaatccgggttggatctagagacgggtcgggttatgagattgtttggggttgatatttctttaaacgccgtcgttgtagtgaaggaaacaacggaggtgttaatgtcgtcgttaaggtgtaagaagcaacgagttttgtaataacaatttaacaacttgggaaagaaaaaaaagctttttgattttaatttctcttcaacgttaatcttgctgagatta

SEQ ID NO: 78 - protein, 333 aa, Arabidopsis thaliana
  G1930 Polypeptide (domain in AA coordinates: 59-124)
MDAMSSVDESSTTTDSIPARKSSSPASLLYRMGSGTSVVLDSENGVEVEVEAESRKLPSSRFKGVVPQPNGRWGAQIYEKHQRVWLGTFNEEDEAARAYDVAAHRFRGRDAVTNFKDTTFEEEVEFLNAHSKSEIVDMLRKHTYKEELDQRKRNRDGNGKETTAFALASMVVMTGFKTAELLFEKTVTPSDVGKLNRLVIPKHQAEKHFPLPLGNNNVSVKGMLLNFEDVNGKVWRFRYSYWNSSQSYVLTKGWSRFVKEKRLCAGDLISFKRSNDQDQKFFIGWKSKSGLDLETGRVMRLFGVDISLNAVVVVKETTEVLMSSLRCKKQRVL

SEQ ID NO: 79 - DNA, 1029 bp, Arabidopsis thaliana
  G2053
atggagaatccggtgggtttaagattccgtccgaccgacaaggagatcgtcgtcgattacctccgaccaaaaaactccgatagggacacgagtcatgttgatcgagtcattagcacagtcactatccgtagcttcgacccttgggagttaccttgccagtctaggatcaaactgaaagatgagtcttggtgtttcttcagccctaaggagaacaaatatggcagaggtgatcaacaaattagaaaaacgaaatctggttactggaagattactggcaaaccaaagcctatcttgcgtaaccgccaagagatcggtgagaaaaaggttttgatgttttacatgagtaaggaacttggtggatccaaatccgactgggttatgcacgagtaccatgctttctctcctactcagatgatgatgacatatacaatatgtaaagttatgtttaagggtgacgtgagagagatttcttcttcttctgcttcttatggtagtgaaattgagcagagtcgtgactctttaatccctcttcttgtgaacgattctgaggaagaagctcaaatcgaggatgctataccaatagaggaatgggaaacatggttgactgatgatggtgttgatgagcaggtgaatcatattatgaatatgaaagatgatcgcaacaaccacaggcctcaaaagccattgactggtgtcttgattgacgatagtagtgatgatgatgatgattctgatttgctatctccaacaacaaattctattgaaaattcgagcacttgtgatagttttggtagctcagaccaaatcaacttagtgtcactaactcaagaggtgagccaagctctgataaccagtattgatacacccgagaagattaagagtccttatgatgatgcacaagggactggggctggagggcaaaaattgggtcaagagactcgagagaagaaacgagctggtttctttcacaggatgatacaaatattcgtcaagaaaattcaccaatgttcttctatctcaagaacataa

SEQ ID NO: 80 - protein, 342 aa, Arabidopsis thaliana
  G2053 Polypeptide (conserved domain in AA coordinates:10-149)
MENPVGLRFRPTDKEIVVDYLRPKNSDRDTSHVDRVISTVTIRSFDPWELPCQSRIKLKDESWCFFSPKENKYGRGDQQIRKTKSGYWKITGKPKPILRNRQEIGEKKVLMFYMSKELGGSKSDWVMHEYHAFSPTQMMMTYTICKVMFKGDVREISSSSASYGSEIEQSRDSLIPLLVNDSEEEAQIEDAIPIEEWETWLTDDGVDEQVNHIMNMKDDRNNHRPQKPLTGVLIDDSSDDDDDSDLLSPTTNSIENSSTCDSFGSSDQINLVSLTQEVSQALITSIDTPEKIKSPYDDAQGTGAGGQKLGQETREKKRAGFFHRMIQIFVKKIHQCSSISRT

SEQ ID NO: 81 - DNA, 1514 bp, Arabidopsis thaliana
  G2140
actctcttaactttcgtttcttctcctaccttcttttaccaacctttcctttctcttacacacatatatatatacatatatagagagagagaagaggacaaagagttgaaagatgaagactctcatgtcttcatagaaacaagtgatatgtgcgctaagaaagaagaagaagaagaagaagaagaagacagttctgaagccatgaacaacatacaaaattaccaaaatgacctcttctttcaccaactcatctctcatcatcaccatcatcatcatgatccttctcaatctgaaactttgggagcatccggtaacgttggatctggtttcactatcttctctcaagattccgtctctccaatatggtctctacctccacctacctcgatccaaccaccatttgatcagtttcctcctccttcttcttctccagcatctttctacggaagtttcttcaacagaagtcgagctcatcatcagggattacagtttgggtacgagggttttggtggagccacgtcagcagcacatcatcatcatgaacaacttcggatcttgtcggaagctttaggtccggtagtacaagccgggtccggtccttttgggttacaagctgagttagggaagatgacagcacaagagatcatggacgctaaagctttggctgcttcaaagagtcatagtgaagctgagagaagaagaagagagagaatcaataatcatctcgctaagctccgtagcatattacccaacaccaccaaaacggataaagcgtcgttactagctgaagtgatccaacatgtgaaagagttgaagagagagacttcagtgatctcagagacaaatcttgtcccaacggaaagcgatgagttaacggtagctttcacggaggaggaagaaaccggagatggcagatttgtaattaaagcgtcgctttgctgtgaagacaggtcggatctcttgcctgacatgattaaaacattgaaagctatgcgtctcaaaacgctcaaggcggagataaccaccgttgggggacgagtcaagaacgttttgtttgttaccggagaagagagctccggtgaggaagtggaggaagagtactgtatagggacgattgaggaagctttgaaagcggtgatggagaagagcaatgtagaggaatcatcttcttctggaaatgctaagagacagagaatgagtagtcacaacactatcactatcgtcgaacaacaacaacaatataatcagaggtaatcaattttttacttaaatcgcttttttttcttactttcggtgtatctactacgtgtgttgtttgctggttatggaaatgaatgttgtacgtcacgttatactatagatatatgtgtgtttgtgtgtatgtataacggaagtatttgtatccgttgtggtcttggacttttggtttggttctaagatacttatttttaaaaacttgtatcgttgagttggttttctagatatgcttaatgggagtatgtgacgaaaaaaaa

SEQ ID NO: 82 - protein, 368 aa, Arabidopsis thaliana
  G2140 Polypeptide (domain in AA coordinates:167-242)
MCAKKEEEEEEEEDSSEAMNNIQNYQNDLFFHQLISHHHHHHHDPSQSETLGASGNVGSGFTIFSQDSVSPIWSLPPPTSIQPPFDQFPPPSSSPASFYGSFFNRSRAHHQGLQFGYEGFGGATSAAHHHHEQLRILSEALGPVVQAGSGPFGLQAELGKMTAQEIMDAKALAASKSHSEAERRRRERINNHLAKLRSILPNTTKTDKASLLAEVIQHVKELKRETSVISETNLVPTESDELTVAFTEEEETGDGRFVIKASLCCEDRSDLLPDMIKTLKAMRLKTLKAEITTVGGRVKNVLFVTGEESSGEEVEEEYCIGTIEEALKAVMEKSNVEESSSSGNAKRQRMSSHNTITIVEQQQQYNQR

SEQ ID NO: 83 - DNA, 1383 bp, Arabidopsis thaliana
  G2153
ttcttgcttagtatcattctttgtcgtgttcttttaattaaccttttgcaatttgtcttgtgtttctcacaacacaaaaacttgtaaaagtgttaaaaaatcaagatctgaaaaatcttatcaccgcttctaggtttttcagttttttttcttccttttcctgatctaaattaacttatatttcttagggtttcacttcttgaaacatttaatcagaattaattaacctctctagggctttcatggcgaatccatggtggacaggacaagtgaacctatccggcctcgaaacgacgccgcctggttcctctcagttaaagaaaccagatctccacatctccatgaacatggccatggactcaggtcacaataatcatcaccatcaccaagaagtcgataacaacaacaacgacgacgatagagacaacttgagtggagacgaccacgagccacgtgaaggagccgtagaagcccccacgcgccgtccacgtggacgtcctgctggttccaagaacaaaccaaagccaccgatcttcgtcactcgcgattctccaaatgctctcaagagccatgtcatggagatcgctagtgggactgacgtcatcgaaaccctagctacttttgctaggcggcgtcaacgtggcatctgcatcttgagcggaaatggcacagtggctaacgtcaccctccgtcaaccctcgaccgctgccgttgcggcggctcctggtggtgcggctgttttggctttacaagggaggtttgagattctttctttaaccggttctttcttgccaggaccggctccacctggttccaccggtttaacgatttacttagccggtggtcaaggtcaggttgttggaggaagcgtggtgggcccattgatggcagcaggtccggtgatgctgatcgccgccacgttctctaacgcgacttacgagagattgccattggaggaggaagaggcagcagagagaggcggtggtggaggcagcggaggagtggttccggggcagctcggaggcggaggttcgccactaagcagcggtgctggtggaggcgacggtaaccaaggacttccggtgtataatatgccgggaaatcttgtttctaatggtggcagtggtggaggaggacagatgagcggccaagaagcttatggttgggctcaagctaggtcaggattttaacgtgcgttaaaatggtttttaatttacagaagttaacaataagattataatgatgtttattatgatgatgaaaaccagtcagttgctacttgttactagtgagctatatagtttgtggacattatattatgttctctcttgactatgattattatttgctaaatttcacttagctaaaaaaaaaaaaaaaaaa

SEQ ID NO: 84 - protein, 315 aa, Arabidopsis thaliana
  G2153 Polypeptide (domains in AA coordinates: 80-88, 162-206, DUF296:107-232)
MANPWWTGQVNLSGLETTPPGSSQLKKPDLHISMNMAMDSGHNNHHHHQEVDNNNNDDDRDNLSGDDHEPREGAVEAPTRRPRGRPAGSKNKPKPPIFVTRDSPNALKSHVMEIASGTDVIETLATFARRRQRGICILSGNGTVANVTLRQPSTAAVAAAPGGAAVLALQGRFEILSLTGSFLPGPAPPGSTGLTIYLAGGQGQVVGGSVVGPLMAAGPVMLIAATFSNATYERLPLEEEEAAERGGGGGSGGVVPGQLGGGGSPLSSGAGGGDGNQGLPVYNMPGNLVSNGGSGGGGQMSGQEAYGWAQARSGF

SEQ ID NO: 85 - DNA, 799 bp, Arabidopsis thaliana
  G2379
cgccgtcactctcctcccggtgccgcacattagcaacactactcccgacgaatggagacgacgacgccgcagtcaaaatcaagtgtgtcccaccgaccgccgttgggaagagaagactggtggagtgaggaagcgacggcgacgctggtagaagcctggggcaatcgttacgtcaagctgaaccacggaaatctccggcagaatgactggaaagacgtcgccgacgccgttaactctagacacggtgataacagccgtaagaagaccgacttacagtgtaagaaccgggtcgatactttgaagaagaagtacaaaacagagaaagctaaactctcgccgtcgacttggcgtttctataaccgcctcgatgttctaatcggtcccgttgtgaagaaatcggctggcggagttgtcaaatcagcgccttttaagaatcatctgaatccaactggatcgaactctactggaagctctcttgaagatgatgatgaggatgatgatgaggttggtgattgggaattcgttgctaggaagcatcctcgtgtggaagaggtagatctgagtgaaggatcaacgtgtagggaactagctacggcgattctcaagtttggagaagtttacgagagaattgaagggaagaagcaacagatgatgattgagttggagaagcagagaatggaagtgacaaaggaggtagagttaaaacgaatgaacatgttgatggagatgcagttagagattgagaaatcaaagcaccggaaacgcgcaagtgcttcaggtaagaagaactcacattagg

SEQ ID NO: 86 - protein, 248 aa, Arabidopsis thaliana
  G2379 Polypeptide (domain in AA coordinates:19-110, 173-232)
METTTPQSKSSVSHRPPLGREDWWSEEATATLVEAWGNRYVKLNHGNLRQNDWKDVADAVNSRHGDNSRKKTDLQCKNRVDTLKKKYKTEKAKLSPSTWRFYNRLDVLIGPVVKKSAGGVVKSAPFKNHLNPTGSNSTGSSLEDDDEDDDEVGDWEFVARKHPRVEEVDLSEGSTCRELATAILKFGEVYERIEGKKQQMMIELEKQRMEVTKEVELKRMNMLMEMQLEIEKSKHRKRASASGKKNSH

SEQ ID NO: 87 - DNA, 866 bp, Arabidopsis thaliana
  G2701
gtgtttgtagttgaaacttattcttccctttttttgtttttaggtatggagactctgcatccattctctcacctacctatctctgaccaccggttcgttgttcaagagatggtgagcttacacagctcgagtagcggtagctggactaaagaagagaacaagatgttcgaacgagctcttgcgatatacgctgaagactcgcctgatcgctggtttaaagttgcttccatgatccctggaaagactgtttttgatgttatgaagcaatatagtaagcttgaagaagacgttttcgatattgaagcaggacgtgttcccattcctggttatcctgcagcttcttctcccttggggtttgacacggacatgtgtcgtaaacggcctagtggagctagaggatctgatcaagatcgaaagaaaggagtcccttggacagaggaagaacacaggagattcttgttaggccttctcaagtacggtaaaggagattggagaaacatatcgagaaacttcgtggtgtcaaagacgccaacgcaagtggcgagccacgcccaaaagtattaccagagacagctctccggagccaaggacaaacgcaggccaagtatccatgacatcacaaccggcaatcttctcaatgccaatctcaaccgttccttttccgatcatagagatattctccctgatttagggtttatcgataaggatgatacggaggagggagtaatatttatgggtcagaatctctcttcagaaaatctgttttctccatcaccaacttcattcgaagctgccattaacttcgccggagaaaatgtcttcagtgccggagcttaaggcaacatagaatccccaaactcagcggc

SEQ ID NO: 88 - protein, 263 aa, Arabidopsis thaliana
  G2701 Polypeptide (domain in AA coordinates: 33-81, 129-183)
METLHPFSHLPISDHRFVVQEMVSLHSSSSGSWTKEENKMFERALAIYAEDSPDRWFKVASMIPGKTVFDVMKQYSKLEEDVFDIEAGRVPIPGYPAASSPLGFDTDMCRKRPSGARGSDQDRKKGVPWTEEEHRRFLLGLLKYGKGDWRNISRNFVVSKTPTQVASHAQKYYQRQLSGAKDKRRPSIHDITTGNLLNANLNRSFSDHRDILPDLGFIDKDDTEEGVIFMGQNLSSENLFSPSPTSFEAAINFAGENVFSAGA

SEQ ID NO: 89 - DNA, 1200 bp, Arabidopsis thaliana
  G2719
atggaaggagaaactcatcaatcggagccgttacctttagcatctggagattccgatgaagggatcagtgctgcgattgaggcggagcttgctgagttagctgctggagattcaagcggcggtggtggttgcggcggcggaggaggagggattaggagtaaagtcaaaggaccttggtctacggaggaagacgcggttcttacgaagcttgtgaggaaactaggaccgaggaattggagtttgatcgctcgtggaatccctggtcgttctggtaaatcttgtcgattgcgttggtgtaatcagcttgacccttgtctcaagcgtaaacctttctctgatgaggaagatcgtatgataatttctgctcacgcggttcacggaaacaaatgggcagtgattgcgaaactgttaactggaagaacagataacgctatcaagaaccattggaactcaactcttagacgtaaatacgcagatctatggaataatggtcaatggatggctaattcagttactaccgcttccgtcaaaaacgaaaatgtcgatgaaacaactaatcctccatcctcaaaacaacagttgcctcaaggagatatcaattcctccccgccaaagcctccacaagtgagtgatgttgtaatggaagaggcagctaatgaacctcaagaacctcaagaacaacaagaacaagctccaccggtagtgagtaacgttccaacagaaaataacgtgtttcgccccgtggctcgcgttggtgcattcagtatctataacccaaccagccagaaaaatggttacagagactacaatatagttccatgtgagggaccgttgattcaagcagctaaacccgattcattggctggtaaatttctacaatctctttgtgatgaacctcaaatcccgtcaaaatgtggtcacggctgctctactcttccagctgaaactaagttctcacgtaactcggtgttgggacctgagtttgtggattatgaagagccttctgcggttttcaaccaagaactaatatctatagcaaccgatttgaacaacattgcatggataaagagtggccttgacaatgctgttgtcagagaagcagaacagagtttgaagatggataattacaattataatgatcctcgaatcaagtttactggaatgatgcctagacaagatttcttctgtgcaagaagctga

SEQ ID NO: 90 - protein, 399 aa, Arabidopsis thaliana
  G2719 Polypeptide (domain in AA coordinates: 56-154)
MEGETHQSEPLPLASGDSDEGISAAIEAELAELAAGDSSGGGGCGGGGGGIRSKVKGPWSTEEDAVLTKLVRKLGPRNWSLIARGIPGRSGKSCRLRWCNQLDPCLKRKPFSDEEDRMIISAHAVHGNKWAVIAKLLTGRTDNAIKNHWNSTLRRKYADLWNNGQWMANSVTTASVKNENVDETTNPPSSKQQLPQGDINSSPPKPPQVSDVVMEEAANEPQEPQEQQEQAPPVVSNVPTENNVFRPVARVGAFSIYNPTSQKNGYRDYNIVPCEGPLIQAAKPDSLAGKFLQSLCDEPQIPSKCGHGCSTLPAETKFSRNSVLGPEFVDYEEPSAVFNQELISIATDLNNIAWIKSGLDNAVVREAEQSLKMDNYNYNDPRIKFTGMMPRQDFFCARS

SEQ ID NO: 91 - DNA, 1040 bp, Arabidopsis thaliana
  G2789
ctttagggacaccaaatctattcaacctaaaagccttcttttcccctatattgaccaactttttagcgaatcagaagaggaatggatgaggtatctcgttctcatacaccgcaatttctatcaagtgatcatcagcactatcaccatcaaaacgctggacgacaaaaacgcggcagagaagaagaaggagttgaacccaacaatataggggaagacctagccacctttccttccggagaagagaatatcaagaagagaaggccacgtggcagacctgctggttccaagaacaaacccaaagcaccaatcatagtcactcgcgactccgcgaacgccttcagatgtcacgtcatggagataaccaacgcctgcgatgtaatggaaagcctagccgtcttcgctagacgccgtcagcgtggcgtttgcgtcttgaccggaaacggggccgttacaaacgtcaccgttagacaacctggcggaggcgtcgtcagtttacacggacggtttgagattctttctctctcgggttcgtttcttcctccaccggcaccaccagctgcgtctggtttaaaggtttacttagccggtggtcaaggtcaagtgatcggaggcagtgtggtgggaccgcttacggcatcaagtccggtggtcgttatggcagcttcatttggaaacgcatcttacgagaggctgccactagaggaggaggaggaaactgaaagagaaatagatggaaacgcggctagggcgattggaacgcaaacgcagaaacagttaatgcaagatgcgacatcgtttattgggtcgccgtcgaatttaattaactctgtttcgttgccaggtgaagcttattggggaacgcaacgaccgtctttctaagataatatcattgataatataagtttcgtcttcttattctttttcactttttacctttttcactttcttaggttttgttttaacgtttgattaatacctgaaggtttttggaaaattttcgatcggataaaaggatttatgttgcgagccgaaacgcggcc

SEQ ID NO: 92 - protein, 265 aa, Arabidopsis thaliana
  G2789 Polypeptide (domain in AA coordinates: 59-67, 131-175, DUF296:86-201)
MDEVSRSHTPQFLSSDHQHYHHQNAGRQKRGREEEGVEPNNIGEDLATFPSGEENIKKRRPRGRPAGSKNKPKAPIIVTRDSANAFRCHVMEITNACDVMESLAVFARRRQRGVCVLTGNGAVTNVTVRQPGGGVVSLHGRFEILSLSGSFLPPPAPPAASGLKVYLAGGQGQVIGGSVVGPLTASSPVVVMAASFGNASYERLPLEEEEETEREIDGNAARAIGTQTQKQLMQDATSFIGSPSNLINSVSLPGEAYWGTQRPSF

SEQ ID NO: 93 - DNA, 1072 bp, Arabidopsis thaliana; identical to SEQ ID NO: 23
  G303

SEQ ID NO: 94 - protein, 296 aa, Arabidopsis thaliana; identical to SEQ ID NO: 24
  G303 Polypeptide (domain in AA coordinates: 92-161)

SEQ ID NO: 95 - DNA, 876 bp, Arabidopsis thaliana
  G325
atggaggctcgatgtgacttttgtggaaccgaaaaagcattaatctactgcaaatctgattcggctaaactttgtttaaactgtgacgttaatgtacactcagcgaatcctctgtctcaaagacacacgcgatctctactctgcgagaaatgttccttacaacccacggcagtacactgtatgaacgaaaatgtttctctttgccaaggatgtcagtggaccgctagtaactgcactggtttaggacacagacttcagagtctgaacccttactctgattgtccttctccatcagatttcggcaagatctggtcttcaactttagaaccttctgtcacaagtttggtctctccattttctgataccctgctccaggaattagacgattggaatggttcatcaacttccgtggttacacaaactcagaaccttaaagactattcttctttctttcctatggaatctaatcttccaaaagtgatagaagaggaatgttctggtttggatctatgcgaagggataaacttagatgatgcgccgttgaatttcaacgcaagcaatgatataatcggatgttcatcacttgacaataccaaatgttacgagtacgaggattcttttaaggaagagaataacattggccttccttcattactgcttcctactttatccgggaacgttgtaccgaacatgtcactttcgatgtctaacctcacaggagaaagcaatgcgactgattaccaagattgcggaatttcaccagggtttctcataggagattcgccatgggaatcgaatgttgaagttagttttaatccaaaattaagggatgaggctaaaaagagatacaaacaaaagaaatcaaagcgcatgtaa

SEQ ID NO: 96 - protein, 291 aa, Arabidopsis thaliana
  G325 Polypeptide (domain in AA coordinates:5-28, 48-71)
MEARCDFCGTEKALIYCKSDSAKLCLNCDVNVHSANPLSQRHTRSLLCEKCSLQPTAVHCMNENVSLCQGCQWTASNCTGLGHRLQSLNPYSDCPSPSDFGKIWSSTLEPSVTSLVSPFSDTLLQELDDWNGSSTSVVTQTQNLKDYSSFFPMESNLPKVIEEECSGLDLCEGINLDDAPLNFNASNDIIGCSSLDNTKCYEYEDSFKEENNIGLPSLLLPTLSGNVVPNMSLSMSNLTGESNATDYQDCGISPGFLIGDSPWESNVEVSFNPKLRDEAKKRYKQKKSKRM

SEQ ID NO: 97 - DNA, 727 bp, Arabidopsis thaliana
  G353
accaaactcaaaaaacacaaaccacaagaggatcatttcattttttattgtttcgttttaatcatcatcatcagaagaaaaatggttgcgatatcggagatcaagtcgacggtggatgtcacggcggcgaattgtttgatgcttttatctagagttggacaagaaaacgttgacggtggcgatcaaaaacgcgttttcacatgtaaaacgtgtttgaagcagtttcattcgttccaagccttaggaggtcaccgtgcgagtcacaagaagcctaacaacgacgctttgtcgtctggattgatgaagaaggtgaaaacgtcgtcgcatccttgtcccatatgtggagtggagtttccgatgggacaagctttgggaggacacatgaggagacacaggaacgagagtggggctgctggtggcgcgttggttacacgcgctttgttgccggagcccacggtgactacgttgaagaaatctagcagtgggaagagagtggcttgtttggatctgagtctagggatggtggacaatttgaatctcaagttggagcttggaagaacagtttattgattttatttattttccttaaattttctgaatatatttgtttctctcattctttgaatttttcttaatattctagattatacatacatccgcagatttaggaaactttcatagagtgtaatcttttctttctgtaaaaatatattttacttgtagcaaa

SEQ ID NO: 98 - protein, 162 aa, Arabidopsis thaliana
  G353 Polypeptide (domain in aa coordinates: 41-61, 84-104)
MVAISEIKSTVDVTAANCLMLLSRVGQENVDGGDQKRVFTCKTCLKQFHSFQALGGHRASHKKPNNDALSSGLMKKVKTSSHPCPICGVEFPMGQALGGHMRRHRNESGAAGGALVTRALLPEPTVTTLKKSSSGKRVACLDLSLGMVDNLNLKLELGRTVY

SEQ ID NO: 99 - DNA, 785 bp, Arabidopsis thaliana
  G47
cttcttcttcacatcgatcatcatacaacaacaaaaaatggattacagagaatccaccggtgaaagtcagtcaaagtacaaaggaatccgtcgtcggaaatggggcaaatgggtatcagagattagagttccgggaactcgtgaccgtctctggttaggttcattctcaacagcagaaggtgccgccgtagcacacgacgttgctttcttctgtttacaccaacctgattctttagaatctctcaatttccctcatttgcttaatccttcactcgtttccagaacttctccgagatctatccagcaagctgcttctaacgccggcatggccattgacgccggaatcgtccacagtaccagcgtgaactctggatgcggagatacgacgacgtattacgagaatggagctgatcaagtggagccgttgaatatttcagtgtatgattatctgggcggccacgatcacgtttgatttatctcgacggtcatgatcacgtttgatcttcttttgagtaagattttgtaccataatcaaaacaggtgtggtgctaaaatcttactcaaaacaagattaggtaccacagagaaacaatcaaatggttgtgaatatacattataaggttttgattaatgtttgtttcactgatttagtgaagtttggtccattgtatacaaatctattcaagaaacctagcgcgagatcatgtttcgtgattgaagattgagatttttaagtattcgtaatatttttgtaaaatacaaataaaaaaaaaaaaaaaaaaaaa

SEQ ID NO: 100 - protein, 144 aa, Arabidopsis thaliana
  G47 Polypeptide (domain in AA coordinates: 11-80)
MDYRESTGESQSKYKGIRRRKWGKWVSEIRVPGTRDRLWLGSFSTAEGAAVAHDVAFFCLHQPDSLESLNFPHLLNPSLVSRTSPRSIQQAASNAGMAIDAGIVHSTSVNSGCGDTTTYYENGADQVEPLNISVYDYLGGHDHV

SEQ ID NO: 101 - DNA, 1008 bp, Arabidopsis thaliana
  G489
tggatcaacaagaccatggacagtctggagctatgaactatggcacaaacccataccaaaccaacccgatgagcaccactgctgctactgtagcaggaggtgcggcacaaccaggccagctggcgttccaccagatccatcagcagcagcagcagcaacagctggcacagcagcttcaagcattttgggagaaccaattcaaagagattgagaagactaccgatttcaagaaccacagccttccccttgcgagaatcaagaaaatcatgaaagcggatgaagatgtccgtatgatctcggctgaggcgccggtcgtgtttgcaagggcctgtgagatgttcatcctggagctgacactcaggtcgtggaaccacactgaggagaataagaggcggacgttgcagaagaacgatattgctgctgctgtgactagaaccgatatttttgatttccttgtggatattgttccccgggaggatctccgagatgaagtcttgggaagtattccgaggggcactgtcccggaagctgctgctgctggttacccgtatggatacttgcctgcaggaactgctccaataggaaatccgggaatggttatgggtaatcccggtggtgcgtatccacctaatccttatatgggtcaaccaatgtggcaacaacaggcacctgaccaacctgaccaggaaaattagcaagaaactgtgagtcttccagcttcgcggccgctctagacaggcctcgtaccggatcctctagctagagctttcgttcgtatcatcggtttcgacaacgttcgtcaagttcaatgcatcagtttcattgcgcacacaccagaatcctactgagtttgagtattatggcattgggaaaactgtttttcttgtccatttgttgtgcttgtaatttactgtgttttttattcggttttcgctatcgaactgtgaaatggaaatggatggagaagagttaatgaatgatatggccttttgttcattctcaaattaa

SEQ ID NO: 102 - protein, 220 aa, Arabidopsis thaliana
  G489 Polypeptide (domain in AA coordinates: 57-156)
MNYGTNPYQTNPMSTTAATVAGGAAQPGQLAFHQIHQQQQQQQLAQQLQAFWENQFKEIEKTTDFKNHSLPLARIKKIMKADEDVRMISAEAPVVFARACEMFILELTLRSWNHTEENKRRTLQKNDIAAAVTRTDIFDFLVDIVPREDLRDEVLGSIPRGTVPEAAAAGYPYGYLPAGTAPIGNPGMVMGNPGGAYPPNPYMGQPMWQQQAPDQPDQEN

SEQ ID NO: 103 - DNA, 1409 bp, Arabidopsis thaliana
  G502
ttgatgccgctcaatcccactatccttcgcaaggacccttcctctatataaggaagttcatttcatttggagaggacacgctgacaagctgactctagcagatctgggaccgtcgacccacgcgtccgaattgattaggataggatcaggatcatcctcaacaacctcctcctaattcctcctccattcatagtaacaataatattaagaaagagggtaaactatgtcagaattattacagttgcctccaggtttccgatttcaccctaccgatgaagagcttgtcatgcactatctctgccgcaaatgtgcctctcagtccatcgccgttccgatcatcgctgagatcgatctctacaaatacgatccatgggagcttcctggtttagccttgtatggtgagaaggaatggtacttcttctctcccagggacagaaaatatcccaacggttcgcgtcctaaccggtccgctggttctggttactggaaagctaccggagctgataaaccgatcggactacctaaaccggtcggaattaagaaagctcttgttttctacgccggcaaagctccaaagggagagaaaaccaattggatcatgcacgagtaccgtctcgccgacgttgaccggtccgttcgcaagaagaagaatagtctcaggctggatgattgggttctctgccggatttacaacaaaaaaggagctaccgagaggcggggaccaccgcctccggttgtttacggcgacgaaatcatggaggagaagccgaaggtgacggagatggttatgcctccgccgccgcaacagacaagtgagttcgcgtatttcgacacgtcggattcggtgccgaagctgcatactacggattcgagttgctcggagcaggtggtgtcgccggagttcacgagcgaggttcagagcgagcccaagtggaaagattggtcggccgtaagtaatgacaataacaatacccttgattttgggtttaattacattgatgccaccgtggataacgcgtttggaggaggagggagtagtaatcagatgtttccgctacaggatatgttcatgtacatgcagaagccttactagaagggaattcctttcctgccgccgaaacgcaacgcaaaacgaccctcgtttttgcgtttatggcaacacgagaccgttttatatggtcaatgagtgtgccgattcggccattagatttctgttcagtcttcgtttattctatagaccgtccgatttcagatcatccctaatcggacggtggtcgttggatgtatcagtagtgtattactgtgttaggtagaagaaaatccacttgttcttaaattggcataaaagtcagaagctaatatttatatgtgccgcaatcaatttaatattttctgtctaaaaaaaaaaa

SEQ ID NO: 104 - protein, 289 aa, Arabidopsis thaliana
  G502 Polypeptide (domain in AA coordinates: 10-155)
MSELLQLPPGFRFHPTDEELVMHYLCRKCASQSIAVPIIAEIDLYKYDPWELPGLALYGEKEWYFFSPRDRKYPNGSRPNRSAGSGYWKATGADKPIGLPKPVGIKKALVFYAGKAPKGEKTNWIMHEYRLADVDRSVRKKKNSLRLDDWVLCRIYNKKGATERRGPPPPVVYGDEIMEEKPKVTEMVMPPPPQQTSEFAYFDTSDSVPKLHTTDSSCSEQVVSPEFTSEVQSEPKWKDWSAVSNDNNNTLDFGFNYIDATVDNAFGGGGSSNQMFPLQDMFMYMQKPY

SEQ ID NO: 105 - DNA, 1481 bp, Arabidopsis thaliana
  G526
cgacccacgcgtccgagattctctcccagctagctttctcaattcatttttctttcttcatcttcttcttgtgtgatctctctttccaaataagcttatcattcttacaaaaatatttctgggtttctgatattgttcttgttctcttgaatctttattacttgaaaaacatataaagtgatggcggttgtggttgaagaaggtgtggtgttgaatcatggaggtgaagagcttgtggatttgccacctggtttcaggtttcatccaacagacgaagagatcataacatgttaccttaaggagaaggttttaaacagccgattcacggctgtggccatgggagaagctgatctcaacaagtgtgagccttgggatttgccaaagagggcaaagatgggggagaaagagttctacttcttctgtcaaagggacaggaagtatccgactgggatgaggacgaaccgtgcgacggagtcaggatactggaaagccaccgggaaggataaggagatcttcaaaggcaaaggttgtctcgttgggatgaagaaaacacttgtgttttatagaggaagagctccaaaaggtgaaaagactaattgggtcatgcatgaatatcgtcttgaaggcaaatattcgtattacaatctcccaaaatctgcaagggacgaatgggtcgtgtgtagggtttttcacaagaacaatccttctaccacaacccaaccaatgacgagaatacccgttgaagatttcacaaggatggattctctagagaacattgatcatctcctagacttctcatctcttcctcctctcatagacccgagtttcatgagtcaaaccgaacaaccaaacttcaaacccatcaaccctccaacttacgatatctcatcaccaatccaaccccatcatttcaattcttaccaatcaatctttaaccaccaggtttttggttctgcttcgggctctacgtacaacaacaacaacgagatgatcaagatggagcaatcacttgttagtgtatctcaagaaacatgcctaagctcagatgtgaacgcgaacatgactacaaccacggaggtatcttcgggtcctgtaatgaaacaagaaatggggatgatgggaatggtgaatggtagcaagtcgtatgaagatctatgtgacttgaggggggacttgtgggacttctaattaatcatttgactgtggtgaaagagtatatttgttgggatttaaatcatgttagttaatacatatacatataggatttactagaggcttaatcctagttaactattttcacttcattgatattatttaattagttgattgtttaattagtttatactttatagtgtggttaaaaaagaaaagaaaggattgtgataatttgggattttagtgcataagttatatctcaatgtaaactgtatttgtatccaaaaaaaaaaaaaaaaaaaaaaaaaaaaaaaaaaaaaaaaaaa

SEQ ID NO: 106 - protein, 335 aa, Arabidopsis thaliana
  G526 Polypeptide (domain in AA coordinates: 21-149)
MAVVVEEGVVLNHGGEELVDLPPGFRFHPTDEEIITCYLKEKVLNSRFTAVAMGEADLNKCEPWDLPKRAKMGEKEFYFFCQRDRKYPTGMRTNRATESGYWKATGKDKEIFKGKGCLVGMKKTLVFYRGRAPKGEKTNWVMHEYRLEGKYSYYNLPKSARDEWVVCRVFHKNNPSTTTQPMTRIPVEDFTRMDSLENIDHLLDFSSLPPLIDPSFMSQTEQPNFKPINPPTYDISSPIQPHHFNSYQSIFNHQVFGSASGSTYNNNNEMIKMEQSLVSVSQETCLSSDVNANMTTTTEVSSGPVMKQEMGMMGMVNGSKSYEDLCDLRGDLWDF

SEQ ID NO: 107 - DNA, 1130 bp, Arabidopsis thaliana
  misc_feature (1100)..(1100): n is a, c, g, or t
  G921
ccaagatcgactcttacttcgaatctctctcaactttcttcctcagcttacgggaacttccacacatatacatccacaagaacccatatcgaagattcatcctacatatatttacatggatcagtactcatcctctttggtcgatacttcattagatctcactattggcgttactcgtatgcgagttgaagaagatccaccgacaagtgctttggtggaagaattaaaccgagttagtgctgagaacaagaagctctcggagatgctaactttgatgtgtgacaactacaacgtcttgaggaagcaacttatggaatatgttaacaagagcaacataaccgagagggatcaaatcagccctcccaagaaacgcaaatccccggcgagagaggacgcattcagctgcgcggttattggcggagtgtcggagagtagctcaacggatcaagatgagtatttgtgtaagaagcagagagaagagactgtcgtgaaggagaaagtctcaagggtctattacaagaccgaagcttctgacactaccctcgttgtgaaagatgggtatcaatggaggaaatatggacagaaagtgactagagacaatccatctccaagagcttacttcaaatgtgcttgtgctccaagctgttctgtcaaaaagaaggttcagagaagtgtggaggatcagtccgtgttagttgcaacttatgagggtgaacacaaccatccaatgccatcgcagatcgattcaaacaatggcttaaaccgccacatctctcatggtggttcagcttcaacacccgttgcagcaaacagaagaagtagcttgactgtgccggtgactaccgtagatatgattgaatcgaagaaagtgacgagcccaacgtcaagaatcgattttccccaagttcagaaacttttggtggagcaaatggcttcttccttaaccaaagatcctaactttacagcagctttagcagcagctgttaccggaaaattgtatcaacagaatcataccgagaaatagtttagcttcaaattccgttagagtttttagatttgaatttgtcatgagtaagagaaagagagtagattataatccnttgtgatactgaaaaaaaaaaaaaaaaaaa

SEQ ID NO: 108 - protein, 302 aa, Arabidopsis thaliana
  G921 Polypeptide (domain in AA coordinates: 146-203)
MDQYSSSLVDTSLDLTIGVTRMRVEEDPPTSALVEELNRVSAENKKLSEMLTLMCDNYNVLRKQLMEYVNKSNITERDQISPPKKRKSPAREDAFSCAVIGGVSESSSTDQDEYLCKKQREETVVKEKVSRVYYKTEASDTTLVVKDGYQWRKYGQKVTRDNPSPRAYFKCACAPSCSVKKKVQRSVEDQSVLVATYEGEHNHPMPSQIDSNNGLNRHISHGGSASTPVAANRRSSLTVPVTTVDMIESKKVTSPTSRIDFPQVQKLLVEQMASSLTKDPNFTAALAAAVTGKLYQQNHTEK

SEQ ID NO: 109 - DNA, 1449 bp, Arabidopsis thaliana
  G922
atggtggctatgtttcaagaagataatggaacatcttctgtagcttcatcaccacttcaagtcttctcaactatgtcactcaacagaccgactctcctcgcttcttcatctccgtttcattgtctcaaagatctcaaaccagaggagcgtggtctctacttaatccacctcttgctaacttgtgccaaccacgtggcttcaggtagcctccaaaacgctaacgcagcgctcgagcagctctctcacctcgcttctcctgacggcgacacgatgcagcgaatcgctgcttacttcaccgaagcgcttgctaacagaatccttaagtcctggcctggtctttacaaggctcttaacgcaactcagacaagaactaacaatgtctctgaggagattcatgttagaagactcttctttgagatgttcccgatactcaaagtctcttacttgctcactaatcgagctatactcgaggctatggaaggagagaagatggttcatgtgattgatctcgatgcttctgagccagctcaatggcttgctttgcttcaagcttttaactctaggcctgaaggtccacctcatttgagaatcactggtgttcatcaccagaaggaagtgcttgaacaaatggctcatagactcattgaggaagcagagaaactcgatatcccgtttcagtttaatcccgttgtgagtaggttagactgtttaaatgtagaacagttgcgggttaaaacaggagaggccttagccgttagctcggttcttcaattgcataccttcttggcctctgatgatgatctcatgagaaagaactgcgctttacggtttcagaacaaccctagtggagttgacttgcagagagttctaatgatgagccatggctctgcagctgaggcacgtgagaatgatatgagtaacaacaatgggtatagccctagcggtgactcggcctcatctttgcctttaccaagttcaggaaggactgatagcttcctcaatgctatttggggtttgtctccaaaggtcatggtggtcactgagcaagactcagaccacaacggctccacactaatggagaggctattagaatcactttacacctacgcagcattgtttgattgcttggaaacaaaagttccaagaacgtctcaagataggatcaaagtggagaagatgctcttcggggaggagatcaagaacatcatatcctgcgagggatttgagagaagagaaagacacgagaagcttgagaaatggagccagaggatcgatttggctggttttgggaatgttcctcttagctattatgcgatgttgcaggctaggagattgcttcaagggtgcggttttgatgggtatagaatcaaggaagagagcgggtgcgcagtaatttgctggcaagatcgacctctatactcggtatcagcttggagatgcaggaagtga

SEQ ID NO: 110 - protein, 482 aa, Arabidopsis thaliana
  G922 Polypeptide (conserved domain in AA coordinates:225-242)
MVAMFQEDNGTSSVASSPLQVFSTMSLNRPTLLASSSPFHCLKDLKPEERGLYLIHLLLTCANHVASGSLQNANAALEQLSHLASPDGDTMQRIAAYFTEALANRILKSWPGLYKALNATQTRTNNVSEEIHVRRLFFEMFPILKVSYLLTNRAILEAMEGEKMVHVIDLDASEPAQWLALLQAFNSRPEGPPHLRITGVHHQKEVLEQMAHRLIEEAEKLDIPFQFNPVVSRLDCLNVEQLRVKTGEALAVSSVLQLHTFLASDDDLMRKNCALRFQNNPSGVDLQRVLMMSHGSAAEARENDMSNNNGYSPSGDSASSLPLPSSGRTDSFLNAIWGLSPKVMVVTEQDSDHNGSTLMERLLESLYTYAALFDCLETKVPRTSQDRIKVEKMLFGEEIKNIISCEGFERRERHEKLEKWSQRIDLAGFGNVPLSYYAMLQARRLLQGCGFDGYRIKEESGCAVICWQDRPLYSVSAWRCRK

SEQ ID NO: 111 - DNA, 1388 bp, Arabidopsis thaliana
  G926
ccaaaatctagggttttcttctcgcccaatttcacttttcttctacgaaattctccattcctgccggctgtcgggttttctgaatcgattctccttcaccaacttcttctctggttctgttcgattctgattttttttcaaggtcaattttttcttctctttaaactctgcaaaatcgtgatcgattaaattcacctcagggttttttgatttctgaaagaagttaatcttcttcgaaggcgattgcaaaagagtgctctgctgtgaatttccactgagatgcaatcaaaaccgggaagagaaaacgaagaggaagtcaataatcaccatgctgttcagcagccgatgatgtatgcagagccctggtggaaaaacaactcctttggtgttgtacctcaagcgagaccttctggaattccatcaaattcctcttctttggattgccccaatggttccgagtcaaacgatgttcattcagcatctgaagacggtgcgttgaatggtgaaaacgatggcacttggaaggattcacaagctgcaacttcctctcgttcagataatcacggaatggaaggaaatgacccagcgctctctatccgtaacatgcatgatcagccacttgtacaaccaccagagcttgttggacactatatcgcttgtgtcccaaacccatatcaggatccatattatgggggattgatgggagcatatggtcatcagcaattgggttttcgtccatatcttggaatgcctcgtgaaagaacagctctgccacttgacatggcacaagagcccgtttatgtgaatgcaaagcagtacgagggaattctaaggcgaagaaaagcacgtgccaaggcagagctagagaggaaagtcatccgggacagaaagccatatcttcacgagtcaagacacaagcatgcaatgagaagggcacgagcgagtggaggccggtttgcgaagaaaagtgaggtagaagcgggagaggatgcaggagggagagacagagaaaggggttcagcaaccaactcatcaggctctgaacaagttgagacagactctaatgagaccctgaattcttctggtgcaccataataaaaaaagccaaagctctgagaggagagagagacacacactttggctaatataatccattgcctcaaaccggcaaatcattcttggctttttcgtttttgtgtttgctagttgttcttgtcagagtctcatattgtgtgggtttaacagttatgatgaatgtacaaagagcgagttatgttaggtgttagattttggagacaagagacaaaggaatagcaagtaggtcttgtttttattctttgaccttttttttctcttttgcaaaattgaaaaatacgtttgcttaaaaa

SEQ ID NO: 112 - protein, 271 aa, Arabidopsis thaliana
  G926 Polypeptide (domain in AA coordinates: 131-225)
MQSKPGRENEEEVNNHHAVQQPMMYAEPWWKNNSFGVVPQARPSGIPSNSSSLDCPNGSESNDVHSASEDGALNGENDGTWKDSQAATSSRSDNHGMEGNDPALSIRNMHDQPLVQPPELVGHYIACVPNPYQDPYYGGLMGAYGHQQLGFRPYLGMPRERTALPLDMAQEPVYVNAKQYEGILRRRKARAKAELERKVIRDRKPYLHESRHKHAMRRARASGGRFAKKSEVEAGEDAGGRDRERGSATNSSGSEQVETDSNETLNSSGAP

SEQ ID NO: 113 - DNA, 832 bp, Arabidopsis thaliana
  G481
gagcgtttcgtagaaaaattcgatttctctaaagccctaaaactaaaacgactatccccaattccaagttctagggtttccatcttccccaatctagtataaatggcggatacgccttcgagcccagctggagatggcggagaaagcggcggttccgttagggagcaggatcgataccttcctatagctaatatcagcaggatcatgaagaaagcgttgcctcctaatggtaagattggaaaagatgctaaggatacagttcaggaatgcgtctctgagttcatcagcttcatcactagcgaggccagtgataagtgtcaaaaagagaaaaggaaaactgtgaatggtgatgatttgttgtgggcaatggcaacattaggatttgaggattacctggaacctctaaagatatacctagcgaggtacagggagttggagggtgataataagggatcaggaaagagtggagatggatcaaatagagatgctggtggcggtgtttctggtgaagaaatgccgagctggtaaaagaagttgcaagtagtgattaagaacaatcgccaaatgatcaagggaaattagagatcagtgagttgtttatagttgagctgatcgacaactatttcgggtttactctcaatttcggttatgttagtttgaacgtttggtttattgtttccggtttagttggttgtatttaaagatttctctgttagatgttgagaacacttgaatgaaggaaaaatttgtccacatcctgttgttattttcgattcactttcggaatttcatagctaatttattctcatttaataccaaatccttaaattaa

SEQ ID NO: 114 - protein, 141 aa, Arabidopsis thaliana
  G481 Polypeptide (domain in AA coordinates: 20-109)
MADTPSSPAGDGGESGGSVREQDRYLPIANISRIMKKALPPNGKIGKDAKDTVQECVSEFISFITSEASDKCQKEKRKTVNGDDLLWAMATLGFEDYLEPLKIYLARYRELEGDNKGSGKSGDGSNRDAGGGVSGEEMPSW

SEQ ID NO: 115 - DNA, 1662 bp, Arabidopsis thaliana
  G1807
atgggtgatacagagaagtgtaacagtgatatgatccagagacttcattcatctttcggcactacttcttcttccattcccaaaaatcccatttctcagctcgatttaaaccctaatttcatccgctcatcagctcctcaattctccaagcctttcagtgacagtggcaaacgaatcggtgttcctccgtcgcaccccaacttaatcccaccgacttctccgttttctcagatcccgaccacccgacaacccggttcgcataattttaacccgggaggagctaatcattcacggtcaatgtcacagcccaactctttcttctcttttgactccttacctccgttaagcccttctccgtttcgagatcacgatgtttcaatggaggatagagattccggcgtgtttaacagcaaccattcgttgcctccatcgccgttcacgaggtgtaattcgacctcttctagctccttgagagtcggtgagagtttacctccgagaaagtctcatagacgctccaacagtgatatccccagtgggtttaattcgatgcctttgatccctccgagaccattggagaggtctttttctggtggggagtgtgctgattggtcaaagtctaatccttttgtgaagaaggaatcgagctgcgaaagggaaggtgtcggagagagagaagctatggatgatctcttctcagcatatatgaatcttgaaaacattgatgtgttgaactcctctgaagctgatgatagcaagaacggtaatgagaatagggatgatatggagagcagcagagcaagcgggaccaagactaacggtagtgatacggaaggagagagcagcagtgtcaatgagagtgccaataataatatgaattcttctggtgaaaagagagagagcgtgaagagaagagcggctggaggagatattgctcctaccaccagacattacaggagtgtttcagtggacagttgtttcatggagaagttgtcttttggtgatgaatctctaaagccgcctccttctcctggatctatgtcaaggaaagtttcccctaccaattcggttgatgggaactcgggtgctgcttttagcatcgagttcaataacggtgagtttactgcagcggaaatgaagaagatcatggcaaatgataaactagcagagatggccatgtctgaccctaaacgtgtcaaaaggaatgatcctcttttcagaatcttagcgaaccgtcaatccgcagcacggtcaaaggagaggaagatgcggtacatagtagaattggaacacaaagtgcagactcttcagaccgaggctaccacattgtctgctcagctcacacttttgcagcgcgatatgatggggttgacaaatcagaacaatgagcttaagttccggcttcaagcaatggagcaacaagcgcgtcttcgcgatgctctgaacgaagcactgaatggagaagtccagcgactgaaactggcaatcggtgagagcagtcagaacgaatcagagagatcaaagatgcaatcactcaacgctgagatgttccagcaactcaacatcagccagttaagacagcagccacaacagatgcagcaacagtctcatcagcagaaccaccagaatggaaccatggcaacaaaatctgaatcaaatgaatag

SEQ ID NO: 116 - protein, 553 aa, Arabidopsis thaliana
  G1807 Polypeptide (domain in AA coordinates: 249-297)
MGDTEKCNSDMIQRLHSSFGTTSSSIPKNPISQLDLNPNFIRSSAPQFSKPFSDSGKRIGVPPSHPNLIPPTSPFSQIPTTRQPGSHNFNPGGANHSRSMSQPNSFFSFDSLPPLSPSPFRDHDVSMEDRDSGVFNSNHSLPPSPFTRCNSTSSSSLRVGESLPPRKSHRRSNSDIPSGFNSMPLIPPRPLERSFSGGECADWSKSNPFVKKESSCEREGVGEREAMDDLFSAYMNLENIDVLNSSEADDSKNGNENRDDMESSRASGTKTNGSDTEGESSSVNESANNNMNSSGEKRESVKRRAAGGDIAPTTRHYRSVSVDSCFMEKLSFGDESLKPPPSPGSMSRKVSPTNSVDGNSGAAFSIEFNNGEFTAAEMKKIMANDKLAEMAMSDPKRVKRNDPLFRILANRQSAARSKERKMRYIVELEHKVQTLQTEATTLSAQLTLLQRDMMGLTNQNNELKFRLQAMEQQARLRDALNEALNGEVQRLKLAIGESSQNESERSKMQSLNAEMFQQLNISQLRQQPQQMQQQSHQQNHQNGTMATKSESNE

SEQ ID NO: 117 - DNA, 1218 bp, Arabidopsis thaliana
  G477
atggattcttggagctacgggagaagcgttttcatgtcaaatgaaactcttttaccttgtgatacttttgctaagaatagaagatttgaacagagactctctaataatgatgatgtgttgatttctgacatggctggtaactccaatggattcagtgctgtttctattactaaagttgttcctgaagaggaagatgaggagaacatatcttcttcttcaaagttctctagtcaggaattgaataggatagatttcaaacttaggagctttttggatttaggaaatgatgatgatgatacatcctctagaggttttgctctgccatctaaaaagtctcgagcttcaaacttgtgctctcagaatcccttgtgtcaagtttatgggtgtagtaaggatctgagctcttcgaaagattaccacaaaaggcatagagtttgcgaggctcattcgaaaacttctgtggtcatagttaatggtcttgaacagaggttttgtcaacagtgcagcaggtttcatttcctctcagagtttgatgatggcaaaagaagttgcagaaggcgattagccggtcacaatgaacgaagaaggaaacctgcattctatttcctaccgggtaagcgccataagcttcttcgcacctctcaagatgtagtaggcaacaagtttctggagaattcatcattggtattgccagagtcatttcctggtagtctcttatacagagtaatagatgaagacgaccaccgtacaagtagactcgtgagtttcaaagatgaacctacttgttccatgtttcctactaatgagcaaaacagcagcagaacttatgaatctaaaccagcaatttattccacggaagtatcctccatttgggacttacatgagacggcggcatcacgctctactcgtgctctctctcttctgtcagctcagtcccaacaacacttgtctaagtttccaaacacaacgttctcaatcacccaacccaaccaaaatctcaatcactcatcatcaactgactatcatcagatggaacaaccgttgtggatcgatcctggcaagaccaattctgctggttctagttcttgtaaaggaaaaggaacatccacggttgatctactgcaactgtcatcacatcttcaaagaatcgagcaacagaggaattacactggtgatgtgaagcaggaatataatgagctttatttccctggctcctaa

SEQ ID NO: 118 - protein, 405 aa, Arabidopsis thaliana
  G477 Polypeptide (domain in AA coordinates: 108-233)
MDSWSYGRSVFMSNETLLPCDTFAKNRRFEQRLSNNDDVLISDMAGNSNGFSAVSITKVVPEEEDEENISSSSKFSSQELNRIDFKLRSFLDLGNDDDDTSSRGFALPSKKSRASNLCSQNPLCQVYGCSKDLSSSKDYHKRHRVCEAHSKTSVVIVNGLEQRFCQQCSRFHFLSEFDDGKRSCRRRLAGHNERRRKPAFYFLPGKRHKLLRTSQDVVGNKFLENSSLVLPESFPGSLLYRVIDEDDHRTSRLVSFKDEPTCSMFPTNEQNSSRTYESKPAIYSTEVSSIWDLHETAASRSTRALSLLSAQSQQHLSKFPNTTFSITQPNQNLNHSSSTDYHQMEQPLWIDPGKTNSAGSSSCKGKGTSTVDLLQLSSHLQRIEQQRNYTGDVKQEYNELYFPGS

SEQ ID NO: 119 - DNA, 1913 bp, Arabidopsis thaliana
  G789
ggcaagaagaaccttagcctctctttcttctttctctctctctctctctgtggtactgttctgtttcaactttactccctcagtttcagaacaattccctatctagaagagagataaaaccgagaaggttttggagatagaatcttttgttcttcttttgtccctccttgctcgatttttgttacgtgtgaagcaataaaaaaaaactgatatagctaaatcttccatccattcagaggcttctaaatctgatctgacatggaacaagtgtttgctgattggaattttgaagataattttcacatgtccactaataaaagatcaatcagaccagaagatgaattagtggagctattgtggagagatggtcaagtggttttacaaagccaagctcgtagagaaccgtcagtccaagtccaaacccacaaacaagaaaccctaagaaaacccaacaatatttttcttgacaaccaagaaacagtacaaaagcctaactacgctgctctagatgatcaagaaaccgtctcctggatacaataccctccggatgacgtcatcgaccctttcgaatccgagttctcctctcatttcttctcttcgatcgatcacctcggaggtcctgagaagccacgaacgatcgaagagacagttaagcatgaggctcaagccatggctcctcctaagtttagatcctcggttataacagtcggaccgagtcattgcggcagcaaccagtcaacaaatattcatcaggccactacacttccggtttctatgagtgatagaagcaagaacgtcgaagaaagacttgacacttcgtcaggtggctcctccggttgcagctatggaaggaacaacaaagaaaccgttagtggaacaagtgtaaccattgaccgtaaaagaaaacatgttatggatgctgatcaagaatctgtgtctcaatcagatataggtttgacctcaaccgatgatcaaaccatgggtaacaaatcgagccaacggtcaggatctactcgaagaagccgtgcagctgaagttcataatctctcagaaaggaggaggagagatcggatcaatgaaagaatgaaagctcttcaagaactcatacctcactgcagcagaacagataaagcttcgatattggatgaagcaattgattacttaaaatcacttcaaatgcaactccaagtgatgtggatgggaagtggaatggcggcggcggcagcagcagcagcaagtccgatgatgtttcccggggtacaatcatctccatacattaatcagatggctatgcaaagtcagatgcaattgtctcaattcccggttatgaaccggtccgctccgcagaaccatcccggtttagtatgtcaaaacccggtacagttgcagctccaagcacagaaccaaatcttatcggagcagctcgctaggtacatgggcgggattccccagatgccgccggcgggaaatcagatgcagaccgtgcaacaacaaccagcggacatgttgggatttggatctccggcgggaccgcaaagtcaactgtcggcaccggcgaccaccgacagtcttcatatgggtaaaataggctgacttggcatatagttttcctccgaaattattcttcttacagttggtgattgttatttatttttggtcgcctaagcaagcataaaagctaagtcaaatgtattatagagatctaataagttagtctcatacttataacttatttttaaacagttgaattatagtatcaatcaagtgttgggaacctaaagatcatacatgtgtcaatacttttatatttgttctcaaggttcatcagaaaaacaaaataaaaaggatagactaggcctgcatttgacattatcatgggcttttttgggtctatgaatatgaacattaacccc

SEQ ID NO: 120 - protein, 444 aa, Arabidopsis thaliana
  G789 Polypeptide (domain in AA coordinates: 253-313)
MEQVFADWNFEDNFHMSTNKRSIRPEDELVELLWRDGQVVLQSQARREPSVQVQTHKQETLRKPNNIFLDNQETVQKPNYAALDDQETVSWIQYPPDDVIDPFESEFSSHFFSSIDHLGGPEKPRTIEETVKHEAQAMAPPKFRSSVITVGPSHCGSNQSTNIHQATTLPVSMSDRSKNVEERLDTSSGGSSGCSYGRNNKETVSGTSVTIDRKRKHVMDADQESVSQSDIGLTSTDDQTMGNKSSQRSGSTRRSRAAEVHNLSERRRRDRINERMKALQELIPHCSRTDKASILDEAIDYLKSLQMQLQVMWMGSGMAAAAAAAASPMMFPGVQSSPYINQMAMQSQMQLSQFPVMNRSAPQNHPGLVCQNPVQLQLQAQNQILSEQLARYMGGIPQMPPAGNQMQTVQQQPADMLGFGSPAGPQSQLSAPATTDSLHMGKIG

SEQ ID NO: 121 - DNA, 668 bp, Arabidopsis thaliana
  G1836
ataacaagcctagaacactagaaacttcaaaaaagaaaaaaatcttatggagaacaacaacggcaacaaccagctgccaccgaaaggtaacgagcaactgaagagtttctggtcaaaagagatggaaggtaacttagatttcaaaaatcacgaccttcctataactcgtatcaagaagattatgaagtatgatccggatgtgactatgatagctagtgaggctccaatcctcctctcgaaagcatgtgagatgtttatcatggatctcacgatgcgttcgtggctccatgctcaggaaagcaaacgagtcacgctacagaaatctaatgtcgatgccgcagtggctcaaactgttatctttgatttcttgcttgatgatgacattgaggtaaagagagagtctgttgccgccgctgctgatcctgtggccatgccacctattgacgatggagagctgcctccaggaatggtaattggaactcctgtttgttgtagtcttggaatccaccaaccacaaccacaaatgcaggcatggcctggagcttggacctcggtgtctggtgaggaggaagaagcgcgtgggaaaaaaggaggtgacgacggaaactaataagtggaatacgttttagggtattttcaagggaatatgtagtaaatagtcatggatc

SEQ ID NO: 122 - protein, 187 aa, Arabidopsis thaliana
  G1836 Polypeptide (domain in AA coordinates: 30-164)
MENNNGNNQLPPKGNEQLKSFWSKEMEGNLDFKNHDLPITRIKKIMKYDPDVTMIASEAPILLSKACEMFIMDLTMRSWLHAQESKRVTLQKSNVDAAVAQTVIFDFLLDDDIEVKRESVAAAADPVAMPPIDDGELPPGMVIGTPVCCSLGIHQPQPQMQAWPGAWTSVSGEEEEARGKKGGDDGN

SEQ ID NO: 123 - DNA, 1501 bp, Arabidopsis thaliana
  G196
tcgacatcagatttctctcacggattcctaatcatttttattatatttggatatttgctaattcttcccgtgtataaatctcatataaacacgcatcatacatatatattatgtgcagcgtctttgagtttcaagacatggacaacttccaaggagatctaacagacgtcgtacgaggaataggatcaggccacgtgtcaccatctcctggaccaccggaaggtccatctccgagcagcatgtctccgccgccaacatcagatctccacgtggaattcccctccgccgctacttctgccagctgtctcgcaaatcccttcggagacccgttcgtaagcatgaaggatcctctcatccacctcccggccagctacatctccggcgccggtgataataaaagcaacaaaagttttgcaatctttccaaagatttttgaggatgatcatattaagagtcaatgcagtgtcttcccaagaattaagatctcgcaaagtaacaatatccacgatgcctccacgtgtaattctccggccataaccgtctcctctgccgccgtagcagcttcgccgtggggcatgatcaacgttaataccactaacagtccaagaaactgtttacttgtcgataataataacaacacgtcatcatgctcacaggttcagatctcttcttcccctcggaatctcggaattaagagaaggaagagccaggcaaagaaagtggtgtgcataccggctccagccgctatgaacagccggtccagtggagaagttgttccgtctgatctatgggcttggcgaaagtacggtcaaaaacctatcaaaggttctccttatccaaggggttactacagatgtagcagctcaaaaggttgttcagctaggaaacaagtcgaacgtagccgcactgatccaaacatgttagtcattacttacacctctgagcataaccacccatggcctactcaacgcaacgctctcgcaggttccactcgttcctcttcctcctcctctttaaacccttcttccaaatcctcaaccgcagccgccactacttctccctcatccagagttttccaaaacaacagcagcaaagacgaacccaataactccaacttgccttcctcttccactcatcctccttttgacgccgccgcaattaaggaggagaacgtggaagagcgtcaggaaaagatggagttcgattataatgacgttgaaaatacctatagaccggagttgttgcaagagtttcaacatcagccggaggatttctttgccgatctcgacgagcttgagggagattctttgactatgttgctctctcacagtagcggcggaggcaacatggaaaacaaaacgacgattccagacgtttttagtgatttctttgacgacgacgagtcctcaaggtcgttataaatattgttgttaatgtatacatagaaatgaaattattcatgtaattcgttttgtgttaaatgacggtatttgcctttgca

SEQ ID NO: 124 - protein, 436 aa, Arabidopsis thaliana
  G196 Polypeptide (conserved domain in AA coordinates:223-283)
MCSVFEFQDMDNFQGDLTDVVRGIGSGHVSPSPGPPEGPSPSSMSPPPTSDLHVEFPSAATSASCLANPFGDPFVSMKDPLIHLPASYISGAGDNKSNKSFAIFPKIFEDDHIKSQCSVFPRIKISQSNNIHDASTCNSPAITVSSAAVAASPWGMINVNTTNSPRNCLLVDNNNNTSSCSQVQISSSPRNLGIKRRKSQAKKVVCIPAPAAMNSRSSGEVVPSDLWAWRKYGQKPIKGSPYPRGYYRCSSSKGCSARKQVERSRTDPNMLVITYTSEHNHPWPTQRNALAGSTRSSSSSSLNPSSKSSTAAATTSPSSRVFQNNSSKDEPNNSNLPSSSTHPPFDAAAIKEENVEERQEKMEFDYNDVENTYRPELLQEFQHQPEDFFADLDELEGDSLTMLLSHSSGGGNMENKTTIPDVFSDFFDDDESSRSL

SEQ ID NO: 125 - DNA, 1828 bp, Arabidopsis thaliana
  G2110
gagagctaataaaaaatttatcaaagaagactaatatggagaaggacgatttcttgaggagtggtcatggaagagaagaaagccatgatgagatgagaaaacttgattcatctcacgatgattctcatcaagaacacgaccatattataagatccaagttggactcaactaaagtcgaaatggatgaggctaaagaggaaaatcgaagactaaagtcatcattgagtaaaatcaagaaagattttgacatccttcaaacacaatacaaccaattaatggccaaacataacgaaccaaccaagttccaatcaaaagggcatcatcaagacaaaggcgaagatgaagacagagaaaaagttaacgaacgtgaagaacttgtctcgttgagcctaggcagacggttaaattcagaggttccaagtggttcgaataaagaagaaaaaaataaagatgttgaagaagcggaaggtgacagaaattatgatgataatgaaaaaagcagtattcaagggttgagtatggggattgaatacaaggctttgagtaatcctaatgagaagttagagattgatcataatcaagaaaccatgtcgttggagattagtaacaataataagatcagatcacaaaatagttttgggtttaagaatgatggagatgatcatgaagatgaagatgagattttgcctcaaaaccttgttaagaaaactagggtttcggtgagatcaagatgtgagacaccaacgatgaacgacggatgtcaatggaggaaatatggccagaaaatagctaaaggcaatccatgtccccgagcttactatcgttgcaccattgcagcttcttgtccagtaagaaaacaggtgcaaagatgttcagaagatatgtctatacttatctcaacgtacgaaggaacacataaccatccacttcccatgtcagcaactgccatggcctctgccacttccgctgccgcctccatgcttctctccggcgcctcctcctcctcatccgccgcagctgatcttcatggccttaacttctctctttccggcaacaacatcactccaaaacctaaaactcatttcctccaatccccttcttcttctggccatccgaccgtcactctcgacctcacaacctcctcctcgtcgcagcaaccgttcttatcaatgctcaatagattcagctctcctccaagtaatgtctcacgatctaatagttatccttcaaccaatctcaacttttcaaacaacaccaacacattgatgaattggggtggtggtggtaatcccagtgatcaataccgtgcagcttacggcaacattaacacccatcagcaatcaccttaccacaaaatcattcaaacccgaaccgccgggtcatctttcgatccgtttggaagatcatcttcatcacattctccacaaataaatcttgatcatatcggaatcaagaacatcatcagtcaccaagtgccatctttaccggctgaaacaatcaaggcaatcacgacagatccaagtttccaatcggctttggcgacagctctatcttccatcatgggcggcgatttaaagattgatcacaatgtgactagaaatgaagctgagaagagcccttaaagagaattgttatatatatgttcttatatactcagtacattggtaaatgggtttagactttcactagtttcctagttcatctatatattggttgtttaatcacaagtttattttgttgttggagtttatggaactaatgtgtacatatgaaactttagaacgaataaataaaacttggaattcctttttaaaaaaaaaaaaaaaaa

SEQ ID NO: 126 - protein, 528 aa, Arabidopsis thaliana
  G2110 Polypeptide (conserved domain in AA coordinates:239-298)
MEKDDFLRSGHGREESHDEMRKLDSSHDDSHQEHDHIIRSKLDSTKVEMDEAKEENRRLKSSLSKIKKDFDILQTQYNQLMAKHNEPTKFQSKGHHQDKGEDEDREKVNEREELVSLSLGRRLNSEVPSGSNKEEKNKDVEEAEGDRNYDDNEKSSIQGLSMGIEYKALSNPNEKLEIDHNQETMSLEISNNNKIRSQNSFGFKNDGDDHEDEDEILPQNLVKKTRVSVRSRCETPTMNDGCQWRKYGQKIAKGNPCPRAYYRCTIAASCPVRKQVQRCSEDMSILISTYEGTHNHPLPMSATAMASATSAAASMLLSGASSSSSAAADLHGLNFSLSGNNITPKPKTHFLQSPSSSGHPTVTLDLTTSSSSQQPFLSMLNRFSSPPSNVSRSNSYPSTNLNFSNNTNTLMNWGGGGNPSDQYRAAYGNINTHQQSPYHKIIQTRTAGSSFDPFGRSSSSHSPQINLDHIGIKNIISHQVPSLPAETIKAITTDPSFQSALATALSSIMGGDLKIDHNVTRNEAEKSP

SEQ ID NO: 127 - DNA, 913 bp, Arabidopsis thaliana
  G22
agaaaacatctctcactctctaaaatacacactctcatcaaaaaccttctcttcggttcagaagcattcaagaatccattatgagctcatctgattccgttaataacggcgttaactcacggatgtacttccgtaacccgagtttcagcaacgttatcttaaacgataactggagcgacttgccgttaagtgtcgacgattctcaagacatggctatttacaacactctccgtgatgccgttagctccggctggacaccctccgttcctcccgttacctctccggcggaggaaaataagcctccggcgacgaaggcgagtggctcacacgcgccgaggcagaaggggatgcagtacagaggagtgaggaggaggccgtgggggaaattcgcggcggagattagggatccgaagaagaacggagctagggtttggctcgggacttacgagacgccggaggacgcggcggtggcgtacgaccgagcggcgtttcagctcagaggatcgaaagctaagctgaattttccgcatttgattggttcttgtaagtatgagccggttaggattaggcctcgccgtcgctcgccggaaccgtcagtctccgatcagttaacgtcggagcagaagagggaaagccacgtggatgacggcgagtctagtttggttgtaccggagttggatttcacggtggatcagttttacttcgatggtagtttattaatggaccaatcagaatgttcttattctgataatcggatataattagttttaagattaagcaaaatttgtccaacgagttttgctgtatgaaatatctatcgatgactcaacaggttttgatcatgatcatatgtaatgtgatggaaattaaatattgacgtttgtttttttgttgtaaaaaaaaaaaaaaaaaa

SEQ ID NO: 128 - protein, 226 aa, Arabidopsis thaliana
  G22 Polypeptide (domain in AA coordinates: 89-157)
MSSSDSVNNGVNSRMYFRNPSFSNVILNDNWSDLPLSVDDSQDMAIYNTLRDAVSSGWTPSVPPVTSPAEENKPPATKASGSHAPRQKGMQYRGVRRRPWGKFAAEIRDPKKNGARVWLGTYETPEDAAVAYDRAAFQLRGSKAKLNFPHLIGSCKYEPVRIRPRRRSPEPSVSDQLTSEQKRESHVDDGESSLVVPELDFTVDQFYFDGSLLMDQSECSYSDNRI

SEQ ID NO: 129 - DNA, 1338 bp, Arabidopsis thaliana
  G2713
atgtcgtttcgaggcattgttcaagatttgagagatgggtttgggagcttgtcaaggaggagtttcgattttaggctctcgagtcttcataaagggaaagctcagggttcttcgttccgtgagtattcgtcatcccgtgatctcttgtcgcctgtgatagttcagacaagtagatgggctaatcttcctccagagttactctttgatgtgatcaaaagattagaggaaagtgagagtaattggcctgcaagaaaacatgttgtggcttgtgcttcggtttgtcggtcttggagagctatgtgccaagagattgttttggggcctgaaatctgtgggaaactcactttccctgtttccctcaaacagccagggcctcgtgatgcaatgattcagtgtttcatcaaaagggataaatcaaagctaacatttcacctttttctttgtttaagtcccgctctattagtggagaatgggaaatttcttctttcagctaaaagaactcgtagaactactcgaaccgagtacattatctccatggatgctgataacatctcaagatccagcaactcttacctcggaaagctcagatcaaacttccttgggacaaagttcttggtgtacgacacgcaaccaccaccaaacacatcttcgagcgcacttatcactgatcgaacaagccgaagcaggtttcactccagacgagtttctcctaaagtaccatccggaagctacaacattgctcaaatcacctatgagctcaacgtgttgggcacacgcgggccacgacgaatgcactgcatcatgaactccatcccaatttcatcgctcgaaccaggcggttcagtccctaaccaacccgagaaactcgtccctgcaccatactctctcgacgactcattccgcagtaacatctccttctccaaatcatcatttgaccaccgctccctcgatttcagcagttctagattctccgaaatgggaatatcctgcgacgacaacgaagaagaagcgagtttcagaccgttgattctaaagaacaagcagccaaggtggcacgagcagttgcaatgctggtgtttgaatttccgcggacgtgtgacagttgcatcggttaagaatttccagcttgtagcagcaagacagccgcagcctcaagggacaggtgcagcagcagcaccaacaagtgcacctgctcaccctgagcaagacaaggtgattctccagtttggtaaagtagggaaagatatgttcacaatggactataggtatccattatcggcgtttcaggcgtttgcgatatgcttaagcagctttgacaccaagcttgcttgtgaatag

SEQ ID NO: 130 - protein, 445 aa, Arabidopsis thaliana
  G2713 Polypeptide (domain in AA coordinates: 59-270, 400-445)
MSFRGIVQDLRDGFGSLSRRSFDFRLSSLHKGKAQGSSFREYSSSRDLLSPVIVQTSRWANLPPELLFDVIKRLEESESNWPARKHVVACASVCRSWRAMCQEIVLGPEICGKLTFPVSLKQPGPRDAMIQCFIKRDKSKLTFHLFLCLSPALLVENGKFLLSAKRTRRTTRTEYIISMDADNISRSSNSYLGKLRSNFLGTKFLVYDTQPPPNTSSSALITDRTSRSRFHSRRVSPKVPSGSYNIAQITYELNVLGTRGPRRMHCIMNSIPISSLEPGGSVPNQPEKLVPAPYSLDDSFRSNISFSKSSFDHRSLDFSSSRFSEMGISCDDNEEEASFRPLILKNKQPRWHEQLQCWCLNFRGRVTVASVKNFQLVAARQPQPQGTGAAAAPTSAPAHPEQDKVILQFGKVGKDMFTMDYRYPLSAFQAFAICLSSFDTKLACE

SEQ ID NO: 131 - DNA, 1755 bp, Arabidopsis thaliana
  G312
atggcttacatgtgcactgatagtggcaatctaatggctattgctcaacaagtcatcaaacagaagcagcaacaagaacaacaacagcagcaacatcatcaagaccatcagatttttggtattaatcctttgtctcttaacccatggcccaatacttccctcgggtttgggctttcaggttcggcttttcccgacccgtttcaagttaccggcggcggagattccaacgatcctggctttccttttcctaacttagaccaccaccacgccacaaccaccggcggtgggttcaggttatctgatttcggcggtggaaccggcggcggcgagtttgagtccgacgagtggatggagactcttatcagcggtggagactccgttgcagacggtcctgattgtgacacctggcatgataatcccgattacgtaatctacggtcctgatccattcgatacttacccgagtcgactcagtgtccaaccgtcagatctaaaccgagtcattgacacgtcgagtccgcttcctccgccgaccttgtggcctccttcttcgccattatcgattcctccgcttactcatgagtcaccaaccaaagaagatccagagactaacgactccgaagacgatgacttcgacctagaaccacctctcctcaaagctatatacgactgtgcacggatctcagactctgaccctaacgaagcttccaagacgcttcttcagatccgagaatctgtatcggagctaggtgatccgacggagcgagttgcattttacttcacggaagctctctccaacagactgtctcctaattcgccggcgacgtcgtcttcttcttcatctacggaggatttaatcttatcttataaaaccctaaacgacgcttgtccttactccaaattcgcacatttgacggcgaatcaagcgattctagaagcgacggagaagtcgaacaagattcacatcgtcgattttggaatcgttcaaggtatacaatggcctgctcttcttcaagctctagctactcgtacttctggtaaacccactcaaatccgggtctcgggtatacccgctccatctctcggtgaatctccggaaccgtcgttaatcgccaccggaaaccgcctccgtgatttcgccaaggttctggatctgaatttcgatttcatcccaattctcactcccatacatttacttaacgggtcaagtttccgggtcgacccggatgaagtactggccgtgaatttcatgctccagctctacaaattactcgacgagacgccgacgatagttgacaccgcactacggctcgccaaatcgttgaacccgagggtcgtcactctcggagaatacgaagtgagcttaaaccgggtcggtttcgctaaccgggtaaagaacgcgcttcaattctattccgcggttttcgaatcccttgaaccgaacttggggcgtgattcggaggagagagtgagagttgagcgagagttgttcggccggagaatctcgggtttgattggaccggagaaaaccggaattcatagagaaagaatggaagagaaagagcaatggcgggtattaatggagaatgccggttttgaatcggttaagctgagtaattacgcagtgagccaagcgaagattctattgtggaattacaattacagcaatttgtattcaattgttgaatctaagcctggcttcatctctttggcctggaacgatttacctctcctcactctttcttcctggcgataa

SEQ ID NO: 132 - protein, 584 aa, Arabidopsis thaliana
  G312 Polypeptide (domain in AA coordinates: 320-336)
MAYMCTDSGNLMAIAQQVIKQKQQQEQQQQQHHQDHQIFGINPLSLNPWPNTSLGFGLSGSAFPDPFQVTGGGDSNDPGFPFPNLDHHHATTTGGGFRLSDFGGGTGGGEFESDEWMETLISGGDSVADGPDCDTWHDNPDYVIYGPDPFDTYPSRLSVQPSDLNRVIDTSSPLPPPTLWPPSSPLSIPPLTHESPTKEDPETNDSEDDDFDLEPPLLKAIYDCARISDSDPNEASKTLLQIRESVSELGDPTERVAFYFTEALSNRLSPNSPATSSSSSSTEDLILSYKTLNDACPYSKFAHLTANQAILEATEKSNKIHIVDFGIVQGIQWPALLQALATRTSGKPTQIRVSGIPAPSLGESPEPSLIATGNRLRDFAKVLDLNFDFIPILTPIHLLNGSSFRVDPDEVLAVNFMLQLYKLLDETPTIVDTALRLAKSLNPRVVTLGEYEVSLNRVGFANRVKNALQFYSAVFESLEPNLGRDSEERVRVERELFGRRISGLIGPEKTGIHRERMEEKEQWRVLMENAGFESVKLSNYAVSQAKILLWNYNYSNLYSIVESKPGFISLAWNDLPLLTLSSWR

SEQ ID NO: 133 - DNA, 1065 bp, Arabidopsis thaliana
  G482
tcgacccacgcgtccggacacttaacaattcacaccttctctttttactcttcctaaaaccctaaatttcctcgcttcagtcttcccactcaagtcaaccaccaattgaattcgatttcgaatcattgatggaaatgatttgaaaaaagagtaaagtttatttttttattccttgtaattttcagaaatgggggattccgacagggattccggtggagggcaaaacgggaacaaccagaacggacagtcctccttgtctccaagagagcaagacaggttcttgccgatcgctaacgtcagccggatcatgaagaaggccttgcccgccaacgccaagatctctaaagatgccaaagagacgatgcaggagtgtgtctccgagttcatcagcttcgtcaccggagaagcatctgataagtgtcagaaggagaagaggaagacgatcaacggagacgatttgctctgggctatgactactctaggttttgaggattatgttgagccattgaaagtttacttgcagaggtttagggagatcgaaggggagaggactggactagggaggccacagactggtggtgaggtcggagagcatcagagagatgctgtcggagatggcggtgggttctacggtggtggtggtgggatgcagtatcaccaacatcatcagtttcttcaccagcagaaccatatgtatggagccacaggtggcggtagcgacagtggaggtggagctgcctccggtaggacaaggacttaacaaagattggtgaagtggatctctctctgtatatagatacataaatacatgtatacacatgcctatttttacgacccatataaggtatctatcatgtgatagaacgaacattggtgttggtgatgtaaaatcagatgtgcattaagggtttagattttgaggctgtgtaaaagaagatcaagtgtgctttgttggacaataggattcactaacgaatctgcttcattggatcttgtatgtaactaaagccattgtattgaatgcaaatgttttcatttgggatgctttaaaaaaaaaaaaaaaaa

SEQ ID NO: 134 - protein, 190 aa, Arabidopsis thaliana
  G482 Polypeptide (domain in AA coordinates: 25-116)
MGDSDRDSGGGQNGNNQNGQSSLSPREQDRFLPIANVSRIMKKALPANAKISKDAKETMQECVSEFISFVTGEASDKCQKEKRKTINGDDLLWAMTTLGFEDYVEPLKVYLQRFREIEGERTGLGRPQTGGEVGEHQRDAVGDGGGFYGGGGGMQYHQHHQFLHQQNHMYGATGGGSDSGGGAASGRTRT

SEQ ID NO: 135 - DNA, 1009 bp, Arabidopsis thaliana
  G801
gatagtgataacgaaatcctaattccatggccgacaacgacggagcagtgagtaacggcatcatagtcgagcagacgtcaaacaaaggacctcttaacgccgttaagaaaccaccgtctaaagatcgacacagcaaagttgacggaagaggaagaaggattcgtatgccaatcatttgcgcagctcgagtttttcaattgaccagagagttaggtcacaagtccgatggtcaaaccatagagtggcttctccgtcaagctgagccttctatcatagccgccactggaactggcactactccggcgagtttctccactgcttctctctccacttcttctccgtttactctcgggaaacgtgtcgtcagagcggaggaaggagaatccggcggcggaggaggaggagggttaacagtgggacacacaatggggacttcgttaatgggtggtggtggttctggtgggttttgggctgttccggcgaggccggatttcggacaagtctggagctttgcaaccggagctccaccggaaatggtttttgcgcagcagcagcaaccagctacactcttcgtccgccaccagcagcaacagcaagcttccgccgccgcagcagctgcaatgggtgaggcttcagcagctagagttgggaattatcttccgggtcatcatctcaatttgcttgcttctttgtctggtggagctaacgggtcgggtcggagggaagacgaccacgaaccacgttgagaaatggtattgtctttttggtaatgtatagaaaaattcctatgttttatgtcatcgaaagtgtttagaaagtacctctaatttgcggtttcttttgctccttttttacttaatttaagcttattgcttgtttgattagggttttagggtttaagaatatttggtctcgttaatttgtttcggagagtgatagaaagagagagagattgattgattgttgtacctaaaacgctataaaagctctgtttttactagcgaaaaaa

SEQ ID NO: 136 - protein, 239 aa, Arabidopsis thaliana
  G801 Polypeptide (domain in AA coordinates: 32-93)
MADNDGAVSNGIIVEQTSNKGPLNAVKKPPSKDRHSKVDGRGRRIRMPIICAARVFQLTRELGHKSDGQTIEWLLRQAEPSIIAATGTGTTPASFSTASLSTSSPFTLGKRVVRAEEGESGGGGGGGLTVGHTMGTSLMGGGGSGGFWAVPARPDFGQVWSFATGAPPEMVFAQQQQPATLFVRHQQQQQASAAAAAAMGEASAARVGNYLPGHHLNLLASLSGGANGSGRREDDHEPR

SEQ ID NO: 137 - DNA, 1281 bp, Arabidopsis thaliana
  G867
cacaacacaaacacatttctgttttctccattgtttcaaaccataaaaaaaaacacagattaaatggaatcgagtagcgttgatgagagtactacaagtacaggttccatctgtgaaaccccggcgataactccggcgaaaaagtcgtcggtaggtaacttatacaggatgggaagcggatcaagcgttgtgttagattcagagaacggcgtagaagctgaatctaggaagcttccgtcgtcaaaatacaaaggtgtggtgccacaaccaaacggaagatggggagctcagatttacgagaaacaccagcgcgtgtggctcgggacattcaacgaagaagacgaagccgctcgtgcctacgacgtcgcggttcacaggttccgtcgccgtgacgccgtcacaaatttcaaagacgtgaagatggacgaagacgaggtcgatttcttgaattctcattcgaaatctgagatcgttgatatgttgaggaaacatacttataacgaagagttagagcagagtaaacggcgtcgtaatggtaacggaaacatgactaggacgttgttaacgtcggggttgagtaatgatggtgtttctacgacggggtttagatcggcggaggcactgtttgagaaagcggtaacgccaagcgacgttgggaagctaaaccgtttggttataccgaaacatcacgcagagaaacattttccgttaccgtcaagtaacgtttccgtgaaaggagtgttgttgaactttgaggacgttaacgggaaagtgtggaggttccgttactcgtattggaacagtagtcagagttatgttttgactaaaggttggagcaggttcgttaaggagaagaatctacgtgctggtgacgtggttagtttcagtagatctaacggtcaggatcaacagttgtacattgggtggaagtcgagatccgggtcagatttagatgcgggtcgggttttgagattgttcggagttaacatttcaccggagagttcaagaaacgacgtcgtaggaaacaaaagagtgaacgatactgagatgttatcgttggtgtgtagcaagaagcaacgcatctttcacgcctcgtaacaactcttcttctttttttttcttttgttgttttaataatttttaaaaactccattttcgttttctttatttgcatcggtttctttcttcttgtttaccaaaggttcatgagttgtttttgttgtattgatgaactgtaaattttatttataggataaattttaaaaaaaaaaaaaaaaaaaa

SEQ ID NO: 138 - protein, 344 aa, Arabidopsis thaliana
  G867 Polypeptide (domain in AA coordinates: 59-124)
MESSSVDESTTSTGSICETPAITPAKKSSVGNLYRMGSGSSVVLDSENGVEAESRKLPSSKYKGVVPQPNGRWGAQIYEKHQRVWLGTFNEEDEAARAYDVAVHRFRRRDAVTNFKDVKMDEDEVDFLNSHSKSEIVDMLRKHTYNEELEQSKRRRNGNGNMTRTLLTSGLSNDGVSTTGFRSAEALFEKAVTPSDVGKLNRLVIPKHHAEKHFPLPSSNVSVKGVLLNFEDVNGKVWRFRYSYWNSSQSYVLTKGWSRFVKEKNLRAGDVVSFSRSNGQDQQLYIGWKSRSGSDLDAGRVLRLFGVNISPESSRNDVVGNKRVNDTEMLSLVCSKKQRIFHAS

SEQ ID NO: 139 - DNA, 1879 bp, Arabidopsis thaliana
  G884
tttttttttgtttgttaattttggggatcgatgtcggaaaaggaagaagctccgtcgacatcgaagtccaccggagctccgtcgcgtccgactttatctcttcctccacggccgtttagtgagatgttctttaacggtggcgttggattcagtcctggtccgatgactctggtctctaatatgttccctgattccgatgagtttaggtctttctctcagcttctcgctggagccatgtcttctccagcgactgcagctgctgctgctgctgctgcgacggctagtgattaccagagacttggtgaagggactaatagctctagtggtgatgttgacccgagattcaagcaaaacagaccaaccggtttgatgatttctcaatctcaatcgccgtcgatgttcaccgtaccgcctggtttaagtccagctatgttgctcgattcaccaagctttttgggtcttttctctcccgttcagggatcatatggaatgacacatcagcaagctctagctcaagtcactgctcaagcagttcaagccaatgccaatatgcaaccacaaacagagtaccctcctccctctcaagttcaatcattttcatcgggtcaagcgcagatcccgacctcggctccactaccagctcaaagagaaacctcagatgtaaccatcatagagcacaggtcacaacagcctctaaatgttgacaaaccagctgatgatggctataactggcgaaaatatgggcaaaagcaagttaaaggtagcgagtttccacgaagctattacaagtgtactaatccaggatgtcctgtcaagaagaaggttgagagatctcttgatggacaagtaacggagattatctacaaaggtcagcacaatcatgaacctcctcaaaacactaagcgaggtaacaaagataacaccgcgaatataaatgggagttcgataaataacaatcgcgggagttctgaattgggggcatcacagtttcaaactaatagctccaacaagactaagagagagcaacatgaagcagtaagtcaagctacgacaacagagcacttgtctgaggcaagtgacggtgaagaagttggtaatggagaaactgatgtgagagagaaagatgagaatgagcctgatcccaagagaagaagtacagaagttcggatttcagaaccagctcctgctgcttcacatagaactgtgacagagcctagaattattgtccaaacgacgagtgaagttgatcttctagatgatggatataggtggcgtaaatatggacagaaagttgtcaaagggaatccttatccgaggagctactacaagtgcacaacaccaggatgtggtgtgaggaaacatgtagagagagcagcaacagatccaaaagctgtagtaacaacatatgaaggaaaacataaccatgaccttcccgctgctaaatcaagcagccatgccgctgcagcggcacagttaaggccagataatcgacctggcggtttggctaacttaaatcaacagcagcagcaacagcccgttgcgcggctaaggcttaaagaagagcaaacaacttgagagaagaaaactcttgaccgtttttcattacaaaagctttcaaattccactcacacacttgtctgaaaaatctagcagtttgcaggaaagaaacagcttcaagaggttgtagttcttctatgttctggtgtaaaacttaaaagctttttagggttttcagatttctgtttactaatactgtatgtgaattcttttgtacatgaggaagaaaattacagggggatattttgtgttgtatcttttgtgttattgtttcagtaaaagataggtcttacattttgtgtaaaaaaaaaaaaaaaaaaaa

SEQ ID NO: 140 - protein, 514 aa, Arabidopsis thaliana
  G884 Polypeptide (conserved domains in AA coordinates:227-285, 407-465)
MSEKEEAPSTSKSTGAPSRPTLSLPPRPFSEMFFNGGVGFSPGPMTLVSNMFPDSDEFRSFSQLLAGAMSSPATAAAAAAAATASDYQRLGEGTNSSSGDVDPRFKQNRPTGLMISQSQSPSMFTVPPGLSPAMLLDSPSFLGLFSPVQGSYGMTHQQALAQVTAQAVQANANMQPQTEYPPPSQVQSFSSGQAQIPTSAPLPAQRETSDVTIIEHRSQQPLNVDKPADDGYNWRKYGQKQVKGSEFPRSYYKCTNPGCPVKKKVERSLDGQVTEIIYKGQHNHEPPQNTKRGNKDNTANINGSSINNNRGSSELGASQFQTNSSNKTKREQHEAVSQATTTEHLSEASDGEEVGNGETDVREKDENEPDPKRRSTEVRISEPAPAASHRTVTEPRIIVQTTSEVDLLDDGYRWRKYGQKVVKGNPYPRSYYKCTTPGCGVRKHVERAATDPKAVVTTYEGKHNHDLPAAKSSSHAAAAAQLRPDNRPGGLANLNQQQQQQPVARLRLKEEQTT

SEQ ID NO: 141 - DNA, 485 bp, Arabidopsis thaliana
  G2133
atctcatcttcatccacccaaaaacatggattcaagagacaccggagaaactgaccagagcaagtacaaaggtatccgtcgtcggaaatggggaaaatgggtatcagagattcgtgtcccgggaactcgtcaacgtctctggttaggctctttctccaccgcagaaggcgctgccgtagcccacgacgtcgctttttactgcttgcaccgaccatcttccctcgacgacgaatcttttaacttccctcacttacttacaacctccctcgcctccaatatatctcctaagtccatccaaaaagctgcttccgacgccggcatggccgtggacgccggattccatggtgctgtgtctgggagtggtggttgtgaagagagatcttccatggcgaatatggaggaggaggacaaacttagtatctccgtgtatgattatcttgaagacgatctcgtttgatctatacgagtacgtttttagcagttaa

SEQ ID NO: 142 - protein, 143 aa, Arabidopsis thaliana
  G2133 Polypeptide (domain in AA coordinates:11-83)
MDSRDTGETDQSKYKGIRRRKWGKWVSEIRVPGTRQRLWLGSFSTAEGAAVAHDVAFYCLHRPSSLDDESFNFPHLLTTSLASNISPKSIQKAASDAGMAVDAGFHGAVSGSGGCEERSSMANMEEEDKLSISVYDYLEDDLV

SEQ ID NO: 143 - DNA, 931 bp, Arabidopsis thaliana
  G2517
tcctcactctctctctttttctctaaccataaaatctctttgatctctttctctgtgttttgataatggaaaatgttggtgttgggatgccgttttacgatttagggcaaacaagggtttacccactcttgtctgatttccacgatttatcggcggagaggtatccggtagggttcatggatttactgggtgttcatcgtcatacacccacccatacgccgttgatgcattttccgaccacacctaactcgtcctcgagcgaagctgtgaatggagatgacgaagaagaagaagatggagaagaacagcagcataagacaaagaagcggtttaaattcactaaaatgagtagaaagcagacgaagaagaaggtgccaaaagtgtcattcatcacgaggagtgaggttcttcatctagatgatggttataagtggagaaaatacggtcaaaaacctgtcaaagacagcccttttccaagaaattattaccgttgcacaacaacttggtgtgacgtgaagaagagagtagagagatcattcagtgatccaagcagtgtaatcaccacttacgaaggtcaacatactcatcctcgtccactactcatcatgcccaaagaaggcagctctccatccaatggctcagcttctagggcccacattggcctccctacactccctcctcagcttttagattacaacaaccaacaacaacaagcgccgtcttcttttggaaccgagtacattaacaggcaagaaaaaggaattaatcatgatgatgatgacgatcatgttgtgaagaagagtcgaactcgggatctgctggatggagctggtttagtcaaagatcatggccttcttcaggatgttgttccctctcatatcattaaggaagagtattagttaatcgcataattatgtagctagctagctag

SEQ ID NO: 144 - protein, 277 aa, Arabidopsis thaliana
  G2517 Polypeptide (domain in AA coordinates: 117-177)
MENVGVGMPFYDLGQTRVYPLLSDFHDLSAERYPVGFMDLLGVHRHTPTHTPLMHFPTTPNSSSSEAVNGDDEEEEDGEEQQHKTKKRFKFTKMSRKQTKKKVPKVSFITRSEVLHLDDGYKWRKYGQKPVKDSPFPRNYYRCTTTWCDVKKRVERSFSDPSSVITTYEGQHTHPRPLLIMPKEGSSPSNGSASRAHIGLPTLPPQLLDYNNQQQQAPSSFGTEYINRQEKGINHDDDDDHVVKKSRTRDLLDGAGLVKDHGLLQDVVPSHIIKEEY

SEQ ID NO: 145 - DNA, 795 bp, Arabidopsis thaliana
  G343
atggacgtctatggcttatcttcaccagacttacttcgaatcgacgaccttcttgatttctccaacgaagacatcttctccgcttcttcttccggtggttccaccgccgctacttcctcttcttctttccctcctcctcaaaaccctagtttccaccaccaccatctcccttcctccgccgatcatcactccttcctccacgacatttgcgttcccagtgatgacgcagctcatcttgaatggctttcgcaattcgtggacgattctttcgctgattttccggcgaatccattaggaggaactatgacttctgtcaaaactgaaacttcctttccggggaaaccaagaagcaaacgatcaagagctcctgctcctttcgccggaacatggtctccgatgccactggaatccgagcatcagcagcttcactccgccgccaaattcaagccaaagaaagaacaatccggcggaggaggaggaggaggaggaagacatcagtcatcgtcatcggagactacggaaggaggaggaatgaggagatgtactcactgtgcatcggagaaaacgccacagtggaggacaggaccacttggacctaaaacactatgtaacgcttgtggagtccggtttaaatccggtagacttgtaccggaatatagaccggcttcgagtcctacttttgttttgactcagcattcaaactctcaccggaaagtgatggagcttcgacggcagaaagaagttatgagacaaccacaacaagttcaacttcatcaccaccaccacccgttttag

SEQ ID NO: 146 - protein, 264 aa, Arabidopsis thaliana
  G343 Polypeptide (domain in AA coordinates: 178-214)
MDVYGLSSPDLLRIDDLLDFSNEDIFSASSSGGSTAATSSSSFPPPQNPSFHHHHLPSSADHHSFLHDICVPSDDAAHLEWLSQFVDDSFADFPANPLGGTMTSVKTETSFPGKPRSKRSRAPAPFAGTWSPMPLESEHQQLHSAAKFKPKKEQSGGGGGGGGRHQSSSSETTEGGGMRRCTHCASEKTPQWRTGPLGPKTLCNACGVRFKSGRLVPEYRPASSPTFVLTQHSNSHRKVMELRRQKEVMRQPQQVQLHHHHHPF

SEQ ID NO: 147 - DNA, 2026 bp, Arabidopsis thaliana
  G1062
caaaaaaaaagtttcaatttttgaaagctctgagaaatgaaatctatcattctctctctctatctctatcttccttttcagatttcgcttcttcaattcatgaaatcctcgtgattctactttaatgcttctctttttttacttttccaagtctctgaatattcaaagtatatatcttttgttttcaaacttttgcagaattgtcttcaagcttccaaatttcagttaaaggtctcaactttgcagaattttcctctaaaggttcagactttggggtaaaggtgtcaactttggcgatgggtcttgacggaaacaatggtggaggggtttggttaaacggtggtggtggagaaagggaagagaacgaggaaggttcatggggaaggaatcaagaagatggttcttctcagtttaagcctatgcttgaaggtgattggtttagtagtaaccaaccacatccacaagatcttcagatgttacagaatcagccagatttcagatactttggtggttttccttttaaccctaatgataatcttcttcttcaacactctattgattcttcttcttcttgttctccttctcaagcttttagtcttgacccttctcagcaaaatcagttcttgtcaactaacaacaacaagggttgtcttctcaatgttccttcttctgcaaacccttttgataatgcttttgagtttggctctgaatctggttttcttaaccaaatccatgctcctatttcgatggggtttggttctttgacacaattggggaacagggatttgagttctgttcctgatttcttgtctgctcggtcacttcttgcgccggaaagcaacaacaacaacacaatgttgtgtggtggtttcacagctccgttggagttggaaggttttggtagtcctgctaatggtggttttgttgggaacagagcgaaagttctgaagcctttagaggtgttagcatcgtctggtgcacagcctactctgttccagaaacgtgcagctatgcgtcagagctctggaagcaaaatgggaaattcggagagttcgggaatgaggaggtttagtgatgatggagatatggatgagactgggattgaggtttctgggttgaactatgagtctgatgagataaatgagagcggtaaagcggctgagagtgttcagattggaggaggaggaaagggtaagaagaaaggtatgcctgctaagaatctgatggctgagaggagaaggaggaagaagcttaatgataggctttatatgcttagatcagttgtccccaagatcagcaaaatggatagagcatcaatacttggagatgcaattgattatctgaaggaacttctacaaaggatcaatgatcttcacaatgaacttgagtcaactcctcctggatctttgcctccaacttcatcaagcttccatccgttgacacctacaccgcaaactctttcttgtcgtgtcaaggaagagttgtgtccctcttctttaccaagtcctaaaggccagcaagctagagttgaggttagattaagggaaggaagagcagtgaacattcatatgttctgtggtcgtagaccgggtctgttgctcgctaccatgaaagctttggataatcttggattggatgttcagcaagctgtgatcagctgttttaatgggtttgccttggatgttttccgcgctgagcaatgccaagaaggacaagagatactgcctgatcaaatcaaagcagtgcttttcgatacagcagggtatgctggtatgatctgatctgatcctgacttcgagtccattaagcatctgttgaagcagagctagaagaactaagtccctttaaatctgcaattttcttctcaactttttttcttatgtcataacttcaatctaagcatgtaatgcaattgcaaatgagagttgtttttaaattaagcttttgagaacttgaggttgttgttgttggatacataacttcaaccttttattagcaatgttaacttccatttatgtttcatctt

SEQ ID NO: 148 - protein, 494 aa, Arabidopsis thaliana
  G1062 Polypeptide (domain in AA coordinates: 308-359)
MGLDGNNGGGVWLNGGGGEREENEEGSWGRNQEDGSSQFKPMLEGDWFSSNQPHPQDLQMLQNQPDFRYFGGFPFNPNDNLLLQHSIDSSSSCSPSQAFSLDPSQQNQFLSTNNNKGCLLNVPSSANPFDNAFEFGSESGFLNQIHAPISMGFGSLTQLGNRDLSSVPDFLSARSLLAPESNNNNTMLCGGFTAPLELEGFGSPANGGFVGNRAKVLKPLEVLASSGAQPTLFQKRAAMRQSSGSKMGNSESSGMRRFSDDGDMDETGIEVSGLNYESDEINESGKAAESVQIGGGGKGKKKGMPAKNLMAERRRRKKLNDRLYMLRSVVPKISKMDRASILGDAIDYLKELLQRINDLHNELESTPPGSLPPTSSSFHPLTPTPQTLSCRVKEELCPSSLPSPKGQQARVEVRLREGRAVNIHMFCGRRPGLLLATMKALDNLGLDVQQAVISCFNGFALDVFRAEQCQEGQEILPDQIKAVLFDTAGYAGMI

SEQ ID NO: 149 - DNA, 1146 bp, Arabidopsis thaliana
  G1095
atggatctaacagaccgtcgtaacccttttaacaatcttgtttttccgccgccgcctccgccgccatccacgaccttcacaagccctatattcccacgaacaagctcttccggcaccaatttccccattctggccatcgcagtgattggaatcttagccactgcgttcttacttgtaagttactacatcttcgtgatcaaatgctgtcttaattggcaccaaatcgacatctttcgccgccgcagacgaagcagtgaccaaaaccctctaatgatttactctcctcatgaggtaaacagaggactagacgaatccgccattagagctatcccagtcttcaaattcaagaagagagacgttgttgcaggagaagaagatcagagtaagaactctcaagaatgctctgtttgtttaaacgagtttcaagaagacgagaagctaaggattattcctaactgctgccacgtgtttcacattgattgcattgatatctggcttcagggcaacgcaaattgtcccttgtgcagaaccagcgtttcttgcgaagcaagtttcactcttgacctaatctctgcaccgagctctcctcgggagaatagccctcattctcggaacaggaatctcgaacccggcctggttctaggaggcgatgatgacttcgtcgtcatagagcttggggccagtaatggtaacaacagagaaagcgtgagaaacatagacttccttacggagcaagaaagggttacctcgaatgaggtctcgaccggaaacagcccgaaatcggtgagtcctttgcctataaagtttggtaatcggggaatgtataagaaagaaaggaaatttcacaaagtgacgagtatgggagacgaatgtatcgatactagaggcaaagatggtcattttggtgaaattcagcccataagaagatcgatctcgatggattcatcagtggatcgtcagctgtacttggcggtccaagaggaaatcagccggagaaacaggcagattccggtagctggagacggtgaagatagtagcagtagtggtggtggtaatagcagagtcatgaagagatgtttcttctcttttggaagtagtagaacttcaaaaagttcttcaatattacctgtttatttggaaccctaa

SEQ ID NO: 150 - protein, 381 aa, Arabidopsis thaliana
  G1095 Polypeptide (domain in AA coordinates: 134-159)
MDLTDRRNPFNNLVFPPPPPPPSTTFTSPIFPRTSSSGTNFPILAIAVIGILATAFLLVSYYIFVIKCCLNWHQIDIFRRRRRSSDQNPLMIYSPHEVNRGLDESAIRAIPVFKFKKRDVVAGEEDQSKNSQECSVCLNEFQEDEKLRIIPNCCHVFHIDCIDIWLQGNANCPLCRTSVSCEASFTLDLISAPSSPRENSPHSRNRNLEPGLVLGGDDDFVVIELGASNGNNRESVRNIDFLTEQERVTSNEVSTGNSPKSVSPLPIKFGNRGMYKKERKFHKVTSMGDECIDTRGKDGHFGEIQPIRRSISMDSSVDRQLYLAVQEEISRRNRQIPVAGDGEDSSSSGGGNSRVMKRCFFSFGSSRTSKSSSILPVYLEP

SEQ ID NO: 151 - DNA, 1064 bp, Arabidopsis thaliana
  G1134
taaagaaagagaaaaaaagctttcgtagtgtctattgaaaccagagaaaagccaaaggggatgcaaccaacatccgtcggtagtagcggcggtggtgacgacggaggaggcagaggaggaggaggagggctaagtagaagtggactatctcggatccgttcagctccagcgacttggcttgaagctttacttgaggaagatgaagaagagtctttgaaacctaatcttggtctcaccgatttgcttaccgggaactcgaacgatttaccgacaagtcgcggctcgttcgagttcccgattcctgttgagcaagggttgtatcaacaaggtgggtttcaccgacagaatagtactccggcggattttcttagtggttctgatggatttatccaaagctttgggattcaggcgaattacgattacttatcggggaatatcgatgtttctccgggaagtaagcggtctagagaaatggaagcactcttctcttctcctgagtttacttctcaaatgaaaggagagcaaagcagcggtcaagttcctaccggagtatcaagcatgtcggatatgaacatggagaaccttatggaggactctgttgcttttagggttcgggctaaacgtggttgcgcaactcatccccgcagcattgccgagagggtacgaaggacgcggattagtgatcggataaggaagctacaagagcttgtacctaacatggacaagcaaaccaacactgcagacatgttagaagaagcagtagaatacgtgaaagttcttcaaaggcagatccaggagttaacagaagaacagaagaggtgcacatgcatacctaaggaagaacaataaggtttgctcctgatttgttttatatttgcttaacggcaatgatctgatcgaaaaattcgaaagatgatcttagcttgaatttagatggatgtcatgttgaaaagtatattatttgataaatggatgtaggtgtaatataaaatttttgtacaataatgaagaaagttaaaaagaattaatgaaaacatatattctttatgatataaaaaaaaaaa

SEQ ID NO: 152 - protein, 262 aa, Arabidopsis thaliana
  G1134 Polypeptide (domain in AA coordinates: 198-247)
MQPTSVGSSGGGDDGGGRGGGGGLSRSGLSRIRSAPATWLEALLEEDEEESLKPNLGLTDLLTGNSNDLPTSRGSFEFPIPVEQGLYQQGGFHRQNSTPADFLSGSDGFIQSFGIQANYDYLSGNIDVSPGSKRSREMEALFSSPEFTSQMKGEQSSGQVPTGVSSMSDMNMENLMEDSVAFRVRAKRGCATHPRSIAERVRRTRISDRIRKLQELVPNMDKQTNTADMLEEAVEYVKVLQRQIQELTEEQKRCTCIPKEEQ

SEQ ID NO: 153 - DNA, 831 bp, Arabidopsis thaliana
  G12
gtgtcggtgaattttttgaaacttcttctcttttgcggtttcgtgttccactcctctcttcttggcccacgtgttcatcaatctctccctccgcatgtaatcgcttcgccgtcaatatcacatctttcttcttctttatctttaaaatctctttagatcgattcttttgtggattcttgaaatctccggagaaaaccactatggagacggcgactgaagtggccacggtggtgtcaactccggcggttacggttgcggcggtggcgacgaggaagagagataagccgtataaagggataaggatgaggaagtgggggaagtgggtggcggagataagagagcctaataaaaggtcaaggatctggcttggctcttactctactcctgaagcggcggcgcgtgcttacgacacggcggtgttttatctccgaggtccttctgctcggcttaacttcccggagcttttagccggagtgacggtgacgggaggaggcggaggaggagtgaacggtggtggagatatgtcggcggcgtatataaggagaaaagcggcggaggttggagcacaagtggatgcgttagaagcggcgggggcgggagggaatcgtcatcatcatcatcatcaacatcaacgtggtaatcatgattacgtagataatcatagtgattatcgtattaatgatgatcttatggagtgtagtagtaaagaagggtttaagaggtgtaatggatcgttggaacgggttgatttaaacaaattacccgatccggaaacttcagatgacgattaggaaagcaaaaaatagaaacaaaaaaaaaaaaaaaaaaaaa

SEQ ID NO: 154 - protein, 196 aa, Arabidopsis thaliana
  G12 Polypeptide (domain in AA coordinates: 27-94)
METATEVATVVSTPAVTVAAVATRKRDKPYKGIRMRKWGKWVAEIREPNKRSRIWLGSYSTPEAAARAYDTAVFYLRGPSARLNFPELLAGVTVTGGGGGGVNGGGDMSAAYIRRKAAEVGAQVDALEAAGAGGNRHHHHHQHQRGNHDYVDNHSDYRINDDLMECSSKEGFKRCNGSLERVDLNKLPDPETSDDD

SEQ ID NO: 155 - DNA, 981 bp, Arabidopsis thaliana
  G1330
gtaccggcgacctctttgtgggtcactcttcatcaatgggtgacaaaggaaggagcttaaagatcaacaagaacatggaggaattcacgaaagtggaagaagaaatggacgtaaggagaggtccatggacagttgaggaagatttagagctcatcaattacattgctagtcatggtgaaggtcgatggaactctctcgctcgttgcgccgaactcaaaaggaccggaaaaagctgcagacttcggtggctgaactatctccgaccagatgtgcgccgtggaaacataaccctcgaagaacaactcttgattcttgaacttcacacacgttggggcaatagatggtctaagattgcacaatatttaccaggaagaacggataacgagatcaaaaactattggagaacacgtgttcaaaagcatgcaaaacagcttaaatgcgacgtgaacagtcaacaatttaaagacaccatgaagtatctttggatgcctcggctcgtagaaaggatccaagccgcgtccatcgggtctgtttccatgtcatcttgcgtcaccacctcctcagatcagttcgtgatcaacaacaacaacaccaacaacgtggataatttggctttaatgagtaaccctaatggttacatcacgccggataattccagcgtggcagtatctcctgtatcagatttgacggagtgtcaagtgagtagtgaagtgtggaagattggtcaggatgagaatttggtggatccaaaaatgacatcgccgaattatatggataatagcagtggactattaaacggagattttacgaagatgcaagatcaaagtgaccttaattggtttgaaaatattaatgggatggtaccaaattattcggacagtttttggaacattggaaatgatgaagacttctggctcttacaacaacatcaacaagtccacgacaatggaagcttctgaatagacaagaagctatgcggcc

SEQ ID NO: 156 - protein, 307 aa, Arabidopsis thaliana
  G1330 Polypeptide (domain in AA coordinates: 28-134)
MGDKGRSLKINKNMEEFTKVEEEMDVRRGPWTVEEDLELINYIASHGEGRWNSLARCAELKRTGKSCRLRWLNYLRPDVRRGNITLEEQLLILELHTRWGNRWSKIAQYLPGRTDNEIKNYWRTRVQKHAKQLKCDVNSQQFKDTMKYLWMPRLVERIQAASIGSVSMSSCVTTSSDQFVINNNNTNNVDNLALMSNPNGYITPDNSSVAVSPVSDLTECQVSSEVWKIGQDENLVDPKMTSPNYMDNSSGLLNGDFTKMQDQSDLNWFENINGMVPNYSDSFWNIGNDEDFWLLQQHQQVHDNGSF

SEQ ID NO: 157 - DNA, 1891 bp, Arabidopsis thaliana
  G1666
catcatgagcgtatgagagtaaattcttctcacatattaataacaacccttcaaagttataagatttttagagagagagctaccacgttttcgtatctccgggaacgatggatgaatcaagtattattccggcagagaaagtggccggagctgagaaaaaagagcttcaagggctgcttaagacggcggttcaatctgtggactggacttatagtgtcttctggcaattttgtcctcaacaacgggtcttggtgtgggggaatggatactacaacggtgcaataaagacgaggaagacaactcaaccagcggaggtgacggcagaagaggcggcgttagagaggagccaacagctcagggagctttatgagacacttttagccggagagtcaacgtcagaagcaagagcatgcaccgcattgtcaccggaggatttgacggagacagaatggttttatctaatgtgcgtctctttctcttttcctcctccatctgggatgccaggaaaagcgtatgcaaggaggaagcacgtatggctaagtggtgcaaatgaagttgacagtaaaactttttctagagctattctcgctaagagtgctaaaattcagacagtggtttgcattccaatgcttgatggtgttgtggaactaggcacaacgaaaaaggtaagagaagatgtagagtttgttgagctcacaaagagtttcttctatgaccactgcaagacgaacccaaagccggctctttctgaacactccacctacgaagtgcatgaagaagccgaagacgaagaagaagtagaagaagagatgacaatgtcagaggaaatgaggcttggctctcctgatgatgaagatgtttccaatcaaaatctacactctgatcttcatattgaatcaacccatacgttagacacacatatggacatgatgaatctaatggaggaaggtggaaactattctcagacagtaacaacacttctcatgtcacaccccacaagtcttctttcagattcagtttccacatcttcttacatccaatcatcgtttgccacgtggagggttgagaatggcaaagagcatcagcaagtgaaaacggcgccgtcgtcacaatgggtgctcaaacaaatgatcttcagagttcctttcctccatgacaacactaaagataagaggctaccgcgggaagatctgagccacgtagtagcagagcgacgcaggagggagaagctgaacgagaaattcataacgttgagatcaatggttccatttgtgaccaagatggataaagtctcaatccttggagacaccattgcgtacgtaaatcatcttcgaaagagggtccatgagcttgagaatactcatcatgagcaacagcataagcggacgcgtacttgtaagagaaaaacatcggaggaggtggaggtttccatcatagagaatgatgttttgttagagatgagatgtgagtaccgagatggtttgttgcttgacattcttcaggttcttcatgagcttggtatagagactacggcagttcatacctcggtgaacgaccatgatttcgaggcggagataagggcgaaagtaagagggaagaaagcaagcatcgctgaggtcaaaagagccatccaccaagtcataatacatgatactaatctatagaccctaactttattgatgccaactctagagaaggataattaagcgtatttttgttttagcctcacatgtattaagacatcagttacatatatagccggatgcaacatataaatgaaaatgtactagatgatattgttcatttgtccaatgtagtacttgtgtatgatgcaattgcaacatataaatgcaaatgtactagatgacgatgttgttcgttgtccaattta

SEQ ID NO: 158 - protein, 518 aa, Arabidopsis thaliana
  G1666 Polypeptide (domain in AA coordinates: 353-420)
MDESSIIPAEKVAGAEKKELQGLLKTAVQSVDWTYSVFWQFCPQQRVLVWGNGYYNGAIKTRKTTQPAEVTAEEAALERSQQLRELYETLLAGESTSEARACTALSPEDLTETEWFYLMCVSFSFPPPSGMPGKAYARRKHVWLSGANEVDSKTFSRAILAKSAKIQTVVCIPMLDGVVELGTTKKVREDVEFVELTKSFFYDHCKTNPKPALSEHSTYEVHEEAEDEEEVEEEMTMSEEMRLGSPDDEDVSNQNLHSDLHIESTHTLDTHMDMMNLMEEGGNYSQTVTTLLMSHPTSLLSDSVSTSSYIQSSFATWRVENGKEHQQVKTAPSSQWVLKQMIFRVPFLHDNTKDKRLPREDLSHVVAERRRREKLNEKFITLRSMVPFVTKMDKVSILGDTIAYVNHLRKRVHELENTHHEQQHKRTRTCKRKTSEEVEVSIIENDVLLEMRCEYRDGLLLDILQVLHELGIETTAVHTSVNDHDFEAEIRAKVRGKKASIAEVKRAIHQVIIHDTNL

SEQ ID NO: 159 - DNA, 558 bp, Arabidopsis thaliana
  G546
atgactcgaccgtcaagattacttgagacggcggcgccaccaccacaaccgtcggaggagatgatcgcagcggaatccgacatggtggtgatcttgtcggctcttctttgcgctcttatctgcgttgctggtctcgccgccgtcgtacgatgcgcttggctccggcggtttacagccggaggagattcgccgtcaccgaacaaaggcttgaaaaagaaagctcttcagtctcttccaagatccactttcaccgccgcggaatcaacctccggcgccgccgctgaagagggagactcgacggaatgtgctatttgcctcactgacttcgccgacggtgaagaaataagagtgcttcctctttgtggtcattctttccacgtggagtgtattgacaaatggctagtttctaggtcttcttgtccttcttgtcgcaggattcttacgccggtgagatgtgaccggtgtggtcatgcttctacggcggagatgaaagatcaagctcatcgtcatcaacatcaccaacactcttctactaccattcctacgtttcttccttaa

SEQ ID NO: 160 - protein, 185 aa, Arabidopsis thaliana
  G546 Polypeptide (domain in AA coordinates:114-155)
MTRPSRLLETAAPPPQPSEEMIAAESDMVVILSALLCALICVAGLAAVVRCAWLRRFTAGGDSPSPNKGLKKKALQSLPRSTFTAAESTSGAAAEEGDSTECAICLTDFADGEEIRVLPLCGHSFHVECIDKWLVSRSSCPSCRRILTPVRCDRCGHASTAEMKDQAHRHQHHQHSSTTIPTFLP

SEQ ID NO: 161 - DNA, 2001 bp, Arabidopsis thaliana
  G760
tgcttaattccaatgccatcgtgatcgattcatctctctctctctcttccaattttcccaattcttttttaaaaccctaatttttcagatatctgattatctcttgtatttcttctactcgatttgctcccataaaaacccttactttcttcaagttctggttttcaccgattgatgggtcgtggctcagtgacgtcgcttgctcctgggttccgttttcacccgacggatgaggaacttgttcgctactaccttaagcgtaaggtctgcaacaaaccctttaagttcgatgctatttccgtcaccgacatatacaagtctgagccttgggatctaccagataagtcgaagctgaaaagtagagacttggaatggtacttctttagtatgctggataagaagtacagtaatggttccaagacgaatcgtgctacggagaaagggtattggaagacgactgggaaagatcgggagattcgtaatggttcaagagtcgttgggatgaagaagacacttgtttatcacaagggtcgagctcctcgtggtgaaaggaccaattgggttatgcatgagtatcggctttctgatgaggacttgaagaaagctggtgtgccacaagaagcatatgtgttatgtaggatattccagaaaagtggtacgggtcctaagaatggggagcagtatggtgctccttatcttgaggaggagtgggaagaagatggaatgacttatgtacctgctcaagatgctttcagtgaaggattggctttgaatgatgatgtttatgtcgatattgatgacattgacgagaagcccgaaaatctggtggtctatgatgccgttcctattctacctaactattgtcatggggaatcaagtaacaatgttgaatcaggcaattactcagactctggaaattacattcaaccaggaaacaatgttgtcgactctggtgggtactttgaacaaccaattgaaacttttgaggaagatcggaagcctattatacgggagggtagcattcagccttgttctctgtttccagaggaacaaattggctgtggtgtgcaagacgaaaatgtggtgaatctggaatcttccaacaataatgtgtttgtagctgatacatgctacagtgacattcctattgatcataactatttacccgatgagccattcatggatcctaataacaatcttccactcaacgatggtctgtacctggaaacgaatgatctcagctgtgctcaacaagatgattttaacttcgaagattatctcagcttctttgatgatgagggtttgacttttgacgattctctattaatgggacctgaagattttcttcccaaccaagaagcccttgaccagaaacctgcccctaaagaattggagaaggaggtcgcaggaggcaaagaggcagtggaggaaaaggaaagtggcgaaggatcttcttcaaaacaagatacagatttcaaggactttgattcagctccgaagtacccatttctcaaaaagacgagccacatgcttggagccattcctactccatcttcatttgcttcacagttccaaacaaaggacgcaatgcgtctacacgcagcacaatcttctggttcagttcacgtgactgcaggtatgatgagaatatcaaacatgactctagcagcggacagcggtatgggctggtcatatgacaagaacggtaacctcaacgtagtcctttcattcggggtagtccaacaggatgatgcgatgactgcctcgggaagcaagacaggaattacggcgacaagagctatgttagtcttcatgtgtttatgggttctcctactctctgttagcttcaaaatagtaaccatggtgtctgctcggtaataggatcaaagttgaatcgtctcaaagactttttttggtgtttgtacctctccaatcatatagcctttaactttggcagtgctttgctgctcaatatttaaattttaaaaaaaaaaaaaaaaa

SEQ ID NO: 162 - protein, 567 aa, Arabidopsis thaliana
  G760 Polypeptide (domain in AA coordinates: 12-156)
MGRGSVTSLAPGFRFHPTDEELVRYYLKRKVCNKPFKFDAISVTDIYKSEPWDLPDKSKLKSRDLEWYFFSMLDKKYSNGSKTNRATEKGYWKTTGKDREIRNGSRVVGMKKTLVYHKGRAPRGERTNWVMHEYRLSDEDLKKAGVPQEAYVLCRIFQKSGTGPKNGEQYGAPYLEEEWEEDGMTYVPAQDAFSEGLALNDDVYVDIDDIDEKPENLVVYDAVPILPNYCHGESSNNVESGNYSDSGNYIQPGNNVVDSGGYFEQPIETFEEDRKPIIREGSIQPCSLFPEEQIGCGVQDENVVNLESSNNNVFVADTCYSDIPIDHNYLPDEPFMDPNNNLPLNDGLYLETNDLSCAQQDDFNFEDYLSFFDDEGLTFDDSLLMGPEDFLPNQEALDQKPAPKELEKEVAGGKEAVEEKESGEGSSSKQDTDFKDFDSAPKYPFLKKTSHMLGAIPTPSSFASQFQTKDAMRLHAAQSSGSVHVTAGMMRISNMTLAADSGMGWSYDKNGNLNVVLSFGVVQQDDAMTASGSKTGITATRAMLVFMCLWVLLLSVSFKIVTMVSAR

SEQ ID NO: 163 - DNA, 890 bp, Arabidopsis thaliana; identical to SEQ ID NO: 27
  G913

SEQ ID NO: 164 - protein, 232 aa, Arabidopsis thaliana; identical to SEQ ID NO: 28
  G913 Polypeptide (domain in AA coordinates: 62-128)

SEQ ID NO: 165 - DNA, 1728 bp, Arabidopsis thaliana
  G1064
ctttattttttttcccctcttgtcgaaaacatcacatataaataaaaaaccaaaaaccctaatttataaaatatatataaaatagttatagctccccacttatatatgcaaaagccaacatcaagtatcttaaatgtcataatggacggtggagacagcgtcggaggaggaggaggagatgatcaccaccgtcacctccaccatcaccaccgccctactttcccttttcaactactcggaaaacacgaccccgacgacaaccatcaacaacaaccttccccttcctcctcctcctctctattttctctccatcaacaccaacaattatctcaatcgcaacctcaatcgcaatcgcaaaagtcacaaccgcagacaacgcaaaaagagttattacaaacgcaagaggaatctgcggtggtggcagctaaaaagccaccgttgaaacgagcgtcgacgaaagaccgacacacgaaagtagacggaagagggaggagaataaggatgccggcgttatgtgcagctagggtttttcagctaacgcgagagctaggtcataaatccgacggtgagacaatagagtggcttcttcaacaagctgaaccatctgtaatcgccgccaccggaaccggaacaatcccggcgaatttcacttctttaaacatctctctccgttcttcaggctcttccatgtctcttccttctcatttccgctccgccgcttccacttttagccctaataacatattttctccggcgatgcttcaacaacaacaacaacaacaacgtggtggtggtgttgggtttcatcatccccatctacagggacgtgcacctacgtcgtctttgtttcctggtattgataacttcacaccaacgacgtcgtttttgaactttcataatccaacaaagcaagaaggagatcaagattctgaagagttaaactcggagaagaaaagaagaatccaaacgacgtcggatttgcatcaacaacaacaacaacaccaacatgatcaaatcggaggatatacacttcaatctagcaacagtggatctacggccaccgcagccgccgcgcaacaaataccgggaaatttctggatggttgcggcggctgcggctgcaggtggtggtggtggtaataacaaccaaacaggtggtcttatgacagcttctattggtactggtggcggcggtggagagcctgtttggacgtttccttccattaacacggcagcggcagcgttatatagaagtggcgtttcgggcgttccaagcggcgcggtttctagcggtttacattttatgaatttcgcagcgccaatggcatttcttactggacaacaacagctagcaacaactagtaatcatgagattaatgaagatagtaataataatgaaggaggaagaagtgacggtggtggtgatcatcataatacacagagacatcatcatcatcaacaacaacatcatcataatattctctccggcttgaaccagtacggacggcaagtttccggcgactctcaagctagtggatcacttggaggtggtgatgaggaggatcagcaagattagacacacacaaaaacattttaatggtgggattttctgccgacggcggtagcggtgacggcgttcggcggctgtgtaaaacttttgttttcaccgttaattttttttattttctgtagtaattttttttgctaagtaaaaaaaaaaaaaaaaaaa

SEQ ID NO: 166 - protein, 489 aa, Arabidopsis thaliana
  G1064 Polypeptide (domain in AA coordinates: 116-179)
MQKPTSSILNVIMDGGDSVGGGGGDDHHRHLHHHHRPTFPFQLLGKHDPDDNHQQQPSPSSSSSLFSLHQHQQLSQSQPQSQSQKSQPQTTQKELLQTQEESAVVAAKKPPLKRASTKDRHTKVDGRGRRIRMPALCAARVFQLTRELGHKSDGETIEWLLQQAEPSVIAATGTGTIPANFTSLNISLRSSGSSMSLPSHFRSAASTFSPNNIFSPAMLQQQQQQQRGGGVGFHHPHLQGRAPTSSLFPGIDNFTPTTSFLNFHNPTKQEGDQDSEELNSEKKRRIQTTSDLHQQQQQHQHDQIGGYTLQSSNSGSTATAAAAQQIPGNFWMVAAAAAAGGGGGNNNQTGGLMTASIGTGGGGGEPVWTFPSINTAAAALYRSGVSGVPSGAVSSGLHFMNFAAPMAFLTGQQQLATTSNHEINEDSNNNEGGRSDGGGDHHNTQRHHHHQQQHHHNILSGLNQYGRQVSGDSQASGSLGGGDEEDQQD

SEQ ID NO: 167 - DNA, 2535 bp, Arabidopsis thaliana
  G1084
atgggatgttctcattccaagttagatgatgaagaagcagttcagatctgtaaagacaggaaacgtttcatcaaacaagctattgaacatagaactaagtttgcttctggtcacattgcttatattcactctcttagaaaagtctctgatgctctccatgactttatcctccaaggagacaacaacaatgagtttgttcctactctctgtcaagactcattcgtcactccggtcaagagaatgccacagagacgtcgtcgaagcagccgtagtaatagcggtgagttcatctccatttcgccttcttcgattcctccgaaaatgattcaaggtaggccaagatcgaatgtgaaagcgaattatttgatggctaatagaagtagaccggttagagtcgaacagagatctcctgaaacgtttagagttgagacattttctccacctagtagtagtaaccaatatggtgaatcagatggtttctttggaatgaatatgaatatgaatacttctgcgtctacttcatcttcgttttggaatccgttgagctctcctgagcaaaggttaagtagtcataacattcctcctccttcaccgcagaattcgcagtgggatttcttctggaatccgttttcttcgttggattattatggatacaatagttatgaccgaggaagtgttgatagtaggagtggtatagatgatgagattagaggattgagacgtgttagagaggaagaagggattcctgatttggaagaagatgatgaacctcataaacctgaacctgtcgtcaatgtgcggtttcagaatcataatccgaatccgaaagcaacggaagagaatagaggtaaagttgataagagttgttgcaatgaggaagttaaagttgaagatgttgatgaggatgaagacgaggatggagatgaggatgatgatgagtttacggatagcgggtgtgagactgagaatgagggagacgagaaatgcgttgctcctccaacgcaagaacagcgaaaagctgaggtgtgtagaggaggagaagctacagggaatgttgttggagtaggtaaggttcaagagatgaagaatgttgttggtgttagagatgatgcaaagacgacggggttcacggtatatgtgaaccggagaccaactagcatggctgaagtaatcaaagatcttgaagatcagttcacaacaatttgtgatgcggctaaggaagtctcggggctattggaagctggtagagctcaatacacatcatcctttaatgaccatagtggtgagtttatgaacaatgttgcaatatttctctccaggaaaatgctgaatccagtagcgttgttccgctcgggttcatcaagatcttcctcgtcaagattcttgatcacttcttctggtggttcaagagagagcgggtctgaaagcagaagcgatgtttcagatgaatcttgcatgatttcaggtagccaccaaacaacattggacagacttttcgcgtgggagaagaaactctatgatgaagttagggtaagtaacaagagatataagcaactatctggagaacgtgttcgaagagcatatgaaaagaaatgtatgcagctgaggaatcaggacgtgaaaggagatgatccgcttgcggttgataaaactagggctactatcagagatctagatacacagatcaaggtgtcaatacactccattgaatccatctccaaaagaatcgagactcttcgtgaccaagaactgttgcctcagcttcttgagctcgttgaaggactgacaaatggtaatcatgatcataacagattaacaaggatgtggaaagtaatggcggaaagtcaccagatacagaaacgaacactagacgaagccaaactgttacttgcaggcacaccggtttcaaagcgtcacaagaagagacaacctccaataatgccagaggctattaactctcaaagattagctcaatctgctttgaatcttgaagctcagcttcgaaactggagaacctgttttgaattctggatcacctctcagagatcctacatgaaagcattatctggttggcttctaagatgtttcagatgtgatcctgaccccgaaaaagttagattatcctcatgtcttcacccgatataccgagtctgcattcaatggtcaaggttgcttaacagcttgaatgaaaaaccagttttggacaaacttgagttctttgcctcagggatgggttcaatatatgcaaggcaagttagggaagatccaaactggagtggaagcgggtcaaggagatactccgggtcagaaagcatggagcttgtagtggctgataagggagaagaagatgttgtgatgactgctgagaaacttgcagaggttgctgtgaaggttctctgccatggaatgtctgttgcagttagttcactagctgagttttccatcaactcggccgatgaacactcgaagcttgttagccaaccagcagacgatgcgtcggagcagcagcccccggatgtaaatttcaattcctag

SEQ ID NO: 168 - protein, 844 aa, Arabidopsis thaliana
  G1084 Polypeptide (domain in AA coordinates: 1-53, 490-619)
MGCSHSKLDDEEAVQICKDRKRFIKQAIEHRTKFASGHIAYIHSLRKVSDALHDFILQGDNNNEFVPTLCQDSFVTPVKRMPQRRRRSSRSNSGEFISISPSSIPPKMIQGRPRSNVKANYLMANRSRPVRVEQRSPETFRVETFSPPSSSNQYGESDGFFGMNMNMNTSASTSSSFWNPLSSPEQRLSSHNIPPPSPQNSQWDFFWNPFSSLDYYGYNSYDRGSVDSRSGIDDEIRGLRRVREEEGIPDLEEDDEPHKPEPVVNVRFQNHNPNPKATEENRGKVDKSCCNEEVKVEDVDEDEDEDGDEDDDEFTDSGCETENEGDEKCVAPPTQEQRKAEVCRGGEATGNVVGVGKVQEMKNVVGVRDDAKTTGFTVYVNRRPTSMAEVIKDLEDQFTTICDAAKEVSGLLEAGRAQYTSSFNDHSGEFMNNVAIFLSRKMLNPVALFRSGSSRSSSSRFLITSSGGSRESGSESRSDVSDESCMISGSHQTTLDRLFAWEKKLYDEVRVSNKRYKQLSGERVRRAYEKKCMQLRNQDVKGDDPLAVDKTRATIRDLDTQIKVSIHSIESISKRIETLRDQELLPQLLELVEGLTNGNHDHNRLTRMWKVMAESHQIQKRTLDEAKLLLAGTPVSKRHKKRQPPIMPEAINSQRLAQSALNLEAQLRNWRTCFEFWITSQRSYMKALSGWLLRCFRCDPDPEKVRLSSCLHPIYRVCIQWSRLLNSLNEKPVLDKLEFFASGMGSIYARQVREDPNWSGSGSRRYSGSESMELVVADKGEEDVVMTAEKLAEVAVKVLCHGMSVAVSSLAEFSINSADEHSKLVSQPADDASEQQPPDVNFNS

SEQ ID NO: 169 - DNA, 2054 bp, Arabidopsis thaliana
  G1196
catctgttctgagattgtcttcttcttcttgaaatctttttcatttgtgcaatgattttgaagactacccatctattcagttctttctcttatgatttaagtttcatttagtttttttttctcatccgccattttcgttgactttttgaagcatttctcgaattgactttgttcttcacattgattcattagaatgttctttcataaagtttggatcttttcttcagggcttgattaatttcatatctatgatcttctctgtattgtttttgatccaatcacttctcaaaatttgatccttgtcattggatttagatttagggtttttgtatccttggggatttgaagatcaaaaacagagtctttgagtgatacttctggggaacaaaatggctgcaactgcaatagagccatcttcatctataagtttcacatcttctcacttatcaaacccttctcctgttgttactacttatcactcagctgctaatcttgaagagctcagctctaacttggagcagcttctcactaatccagattgcgattacactgacgcagagatcatcattgaagaagaagctaaccctcggaagcttcgtaactatgttgagaagtcactagtagagaatgttcttcctatcctcttagttgcgtttcattgtgatttgacacagcttcttgatcaatgcattgagagagtggcgagatcagacttagacagattctgtatcgaaaaggagcttcctttagaagtattggaaaaaatcaaacagcttcgagttaagtcggtgaacatacccgaggtggaggataaatcgatagagagaacagggaaagtactcaaggcattggattcagatgatgtagaactcgtgaagcttcttttgactgagtcagatataactctagaccaagccaatggtctacattatgcagtggcatacagtgatccgaaagttgtgacacaggttcttgatctagatatggctgatgttaatttcagaaattccagggggtatacggttcttcatattgctgctatgcgtagagagccaacaattatcataccacttattcaaaaaggagctaatgcttcagatttcacgtttgatggacgcagtgcggtaaatatatgtaggagactcactaggccgaaagattatcataccaaaacctcaaggaaagaacctagtaaataccgcttatgcatcgatatcttggaaagggaaattagaaggaatccattggttagtggggatacacccacttgttcccattcgatgcccgaggatctccaaatgaggttgttatacttagaaaagcgagtgggacttgctcagttgttcttcccagcagaagccaatgtggctatggacgttgctaatgttgaagggacaagcgagtgcacaggtcttctaactccacctccatcaaatgatacaactgaaaacttgggtaaagtcgatttaaatgaaacgccttatgtgcaaacgaaaagaatgcttacacgtatgaaagccctcatgaaaacagttgagacaggtcggagatacttcccatcttgttatgaggttctggataagtacatggatcagtatatggacgaagaaatccctgatatgtcgtatcccgagaaaggcactgtgaaagagagaagacagaagaggatgagatataacgagctgaagaacgacgttaaaaaagcatatagcaaagacaaagtcgcgcggtcttgtctttcttcttcatcaccagcttcttctcttagagaagccttagagaatccaacatgatcttgtcccagataagtaatgctactagagatagttccttggaagaaattagctattttataggttttggtttagaaaacagtggagatcccattttggtattcaggtttattacatggtttaggtttgattttgtattaaaggagatggatttttgaaatgtataaagcaaaacctttcctttttgctttgcttctttctttaaaaaaaaaattgtaatatatggaagtgaaatcgaagcaacgattgagcaaaaaaaaa

SEQ ID NO: 170 - protein, 467 aa, Arabidopsis thaliana
  G1196 Polypeptide (domain in AA coordinates: 179-254)
MAATAIEPSSSISFTSSHLSNPSPVVTTYHSAANLEELSSNLEQLLTNPDCDYTDAEIIIEEEANPRKLRNYVEKSLVENVLPILLVAFHCDLTQLLDQCIERVARSDLDRFCIEKELPLEVLEKIKQLRVKSVNIPEVEDKSIERTGKVLKALDSDDVELVKLLLTESDITLDQANGLHYAVAYSDPKVVTQVLDLDMADVNFRNSRGYTVLHIAAMRREPTIIIPLIQKGANASDFTFDGRSAVNICRRLTRPKDYHTKTSRKEPSKYRLCIDILEREIRRNPLVSGDTPTCSHSMPEDLQMRLLYLEKRVGLAQLFFPAEANVAMDVANVEGTSECTGLLTPPPSNDTTENLGKVDLNETPYVQTKRMLTRMKALMKTVETGRRYFPSCYEVLDKYMDQYMDEEIPDMSYPEKGTVKERRQKRMRYNELKNDVKKAYSKDKVARSCLSSSSPASSLREALENPT

SEQ ID NO: 171 - DNA, 1538 bp, Arabidopsis thaliana
  G1255
cagctcaaactctctaggactacactaaatctaactttttgcagagagcaaaagattcaataattgagattgatctcaaaaccaaagctctcgtgctcttgtcgttgatgttggttgtgtagactttgtatacaatgatgaaaagtttggcgaatgctgttggagcgaagacggcgagggcttgcgacagctgcgtgaagagacgtgcacggtggtactgcgcggccgacgatgcttttctttgccagtcttgcgacagtttggtccattcagcaaaccctcttgctcgccgccacgagagagtccgtttgaagacggctagcccggcggtcgtaaagcatagcaaccactcatcagcttctcctccacatgaggtcgccacgtggcatcacgggtttactcgtaaagctcgaacgccacgtggctctggtaagaaaaacaattcgtcgatatttcatgacttggttcctgatattagtattgaggatcagacagacaactatgagcttgaagagcagctgatctgtcaagtgccggttctagatccgttggtgtctgagcagttcttgaacgatgtcgttgagcccaagatcgagtttcctatgatcagaagtggtttgatgatcgaggaggaggaagacaacgctgaaagttgtcttaatggatttttcccgaccgacatggagcttgaggagtttgctgctgacgtggagactctgctcggtcgcgggttagacacggagtcgtatgccatggaggagctagggttatctaattcagagatgttcaaaatcgaaaaagatgagattgaagaagaagtagaagagataaaagccatgagcatggatatatttgatgatgatcgaaaagacgtggatggaacagtaccgtttgagctaagctttgattacgagtcgtcacacaagacgtccgaagaagaggtaatgaagaacgttgaaagtagtggtgaatgtgttgttaaggtgaaagaggaagaacataagaatgttctgatgctaagattaaactatgactcggtgatatccacttggggaggtcaaggtccaccgtggagttcaggagagccaccggaacgagacatggacatcagcggttggccagccttttccatggtggagaatggaggagaaagtactcatcagaagcaatacgttggtggatgtttaccatcaagtgggtttggagatggaggtagagaagctagagtttcgagatacagagagaagaggaggacaaggttgttttctaagaagatacggtacgaggtacgtaaattgaatgcagagaaaagaccacgaatgaaaggaagattcgtgaagagagcctcgctcgctgctgctgcttcaccattaggtgttaattactgaatagttaatatctattcatgttatatctcactttacaaatttcggtgaatcttttttcttctgaaacaacagaagttattttggcacttaattgtgctttgaggacttgtatgtacatagaagtaaccaataataatgtgacttttacta

SEQ ID NO: 172 - protein, 416 aa, Arabidopsis thaliana
  G1255 Polypeptide (domain in aa coordinates: 18-56)
MKSLANAVGAKTARACDSCVKRRARWYCAADDAFLCQSCDSLVHSANPLARRHERVRLKTASPAVVKHSNHSSASPPHEVATWHHGFTRKARTPRGSGKKNNSSIFHDLVPDISIEDQTDNYELEEQLICQVPVLDPLVSEQFLNDVVEPKIEFPMIRSGLMIEEEEDNAESCLNGFFPTDMELEEFAADVETLLGRGLDTESYAMEELGLSNSEMFKIEKDEIEEEVEEIKAMSMDIFDDDRKDVDGTVPFELSFDYESSHKTSEEEVMKNVESSGECVVKVKEEEHKNVLMLRLNYDSVISTWGGQGPPWSSGEPPERDMDISGWPAFSMVENGGESTHQKQYVGGCLPSSGFGDGGREARVSRYREKRRTRLFSKKIRYEVRKLNAEKRPRMKGRFVKRASLAAAASPLGVNY

SEQ ID NO: 173 - DNA, 1233 bp, Arabidopsis thaliana
  G1514
atggccgaaactatgaaagatattacgatgaagaacgatgaatcacaggaagaagaaatccccgatcaatttctctgctgcgtttgcctggaacttctttacaagccaattgtgttatcttgtggtcatctatcatgtttttggtgcgtacataagtccatgaatggctttcgtgagtctcattgtccgatatgtagagacccgtatgttcactttccctctgtgtgccagaagctttattttctgttaaagaagatgtacccacttgctcataagaagagagaagaacaagttttaaaggaagagcaagaacgagaatgtttttctcctcagattgatcttgttttggatttgtctgtgtgtagtggagattctctcaatgtctctgataaacagaaggtggaagagtgttcgaatgcagcgaacttattatctagttcatcaagtagaggtgacattccatgtatccccaaaaatcaagaacccacagatgcaaaagctcttaatgttcatgaaaatgaattacttaaggataacaaagtcagtaagcagatttcgaaagatgatttgctctgttcagcatgtaaggagctgcttgtacgacccgtagttctcaattgcggacatgtgtattgtgaaggatgtgtagtagatatggctgaagaaagcgaaaagatcaaatgtcaagagtgtaatgtttgtgacccaagaggatttccaaaagtttgtttgattcttgaacagcttttggaggaaaactttcctgaagaatacaattcaagaagcagtaaggttcagaaaacgctcgcccataatagcaaaggaaatattcaaagctatctcaaagaaggcccgtccttatcaaacgacaataacaatgatgatccctggttggcaaaccctggatcaaatgttcactttggagctggttgtgattcttgtggggtgtatccaatcataggggatcgatacagatgcaaagactgcaaggaggaaattgggtatgacctttgcaaagactgttacgagactccttcgaaagttccagggagattcaaccagcaacacactcctgaccacaggcttgagcttgcacggtctcctcaggttctgatcaatttcaattctatcggtatccttctcggacccgttatctcaaatgaaggcatggatacagatgaaggcgaggaagggcctcctggttcttctaatgagtcatcaagcacagaatga

SEQ ID NO: 174 - protein, 410 aa, Arabidopsis thaliana
  G1514 Polypeptide (domain in AA coordinates: 20-50)
MAETMKDITMKNDESQEEEIPDQFLCCVCLELLYKPIVLSCGHLSCFWCVHKSMNGFRESHCPICRDPYVHFPSVCQKLYFLLKKMYPLAHKKREEQVLKEEQERECFSPQIDLVLDLSVCSGDSLNVSDKQKVEECSNAANLLSSSSSRGDIPCIPKNQEPTDAKALNVHENELLKDNKVSKQISKDDLLCSACKELLVRPVVLNCGHVYCEGCVVDMAEESEKIKCQECNVCDPRGFPKVCLILEQLLEENFPEEYNSRSSKVQKTLAHNSKGNIQSYLKEGPSLSNDNNNDDPWLANPGSNVHFGAGCDSCGVYPIIGDRYRCKDCKEEIGYDLCKDCYETPSKVPGRFNQQHTPDHRLELARSPQVLINFNSIGILLGPVISNEGMDTDEGEEGPPGSSNESSSTE

SEQ ID NO: 175 - DNA, 1031 bp, Arabidopsis thaliana
  G1756
atatgtacttgtacaccaacccaccaaaagagataaaagaggaaacaaaaactcgaaaagagagagatatatgggtgaggtggcttatatggacgaaggagacctagaagcaatagtcagaggctactccggctccggagacgcgttttccggcgaaagttccggtacgttttcaccttcgttttgcctaccgatggagacgtctagtttctacgaaccggagatggagacaagtggcttagatgagctcggtgaactttacaaacccttttaccctttctccacacaaacgatcctcacaagctcggtctctctccctgaagattcaaaacctttccgagatgacaagaaacaacgatcacatggttgtcttttatccaacggatcaagagctgatcatatccgaatttcagaatccaaatcaaagaaaagcaagaagaatcaacagaagagagttgttgagcaagtgaaagaagagaatctgttgtcggacgcatgggcgtggcgtaaatacgggcagaaacccatcaaaggatctccatacccaaggagttattacagatgcagtagctcaaaagggtgtttggcaagaaaacaagtcgaaagaaatcctcaaaacccggagaaattcaccataacatacactaatgagcacaatcatgaactaccaacccggagaaactcattagccggttcgactcgagcaaaaacttcccaacccaaaccaaccttaaccaaaaaatccgaaaaagaagttgtttcttcccctacaagtaatcctatgatcccatccgctgatgaatcttctgttgcggttcaagaaatgagcgttgcggaaacgagtacgcaccaagcggctggagcaatcgagggccgccgcttgagtaacggtttaccatcggatttgatgtccgggagcggaacttttccaagttttaccggtgacttcgatgaactattgaatagccaagagttcttcagtgggtatttatggaattactagagagcattaggtgtatgtatatatatat

SEQ ID NO: 176 - protein, 310 aa, Arabidopsis thaliana
  G1756 Polypeptide (domain in AA coordinates: 138-200)
MGEVAYMDEGDLEAIVRGYSGSGDAFSGESSGTFSPSFCLPMETSSFYEPEMETSGLDELGELYKPFYPFSTQTILTSSVSLPEDSKPFRDDKKQRSHGCLLSNGSRADHIRISESKSKKSKKNQQKRVVEQVKEENLLSDAWAWRKYGQKPIKGSPYPRSYYRCSSSKGCLARKQVERNPQNPEKFTITYTNEHNHELPTRRNSLAGSTRAKTSQPKPTLTKKSEKEVVSSPTSNPMIPSADESSVAVQEMSVAETSTHQAAGAIEGRRLSNGLPSDLMSGSGTFPSFTGDFDELLNSQEFFSGYLWNY

SEQ ID NO: 177 - DNA, 1320 bp, Arabidopsis thaliana
  G1880
atgttgtccaacaagaacacaaacacatgttgtgtggtttcttcttcttcttctgatcctttcctctcctcttcagaaaatggggtcaccaccacaaacacatccactcagaagaggaaaagaagacctgcaggtaccccagatccagatgcagaagttgtgtctttatcaccaagaactcttcttgaatcagacagatacatatgtgagatctgtaaccaagggtttcaaagagaccagaatctccagatgcatagaagacgtcacaaagttccatggaagcttcttaaaagagacaacaacatagaggtgaagaaacgagtctatgtttgccctgaacccacttgccttcaccataatccttgtcatgctctgggagatcttgtcggcatcaaaaaacatttcagaagaaaacatagtaaccataagcaatgggtttgtgagagatgctctaaaggttatgctgttcaatctgattacaaagctcatctcaaaacttgtggtactagaggacattcttgtgactgtggtcgtgtcttctccagggtggagagttttattgaacatcaagataattgttccgcacggagagttcaccgtgaaccgcctcgaccaccacaaaccgcggtaacagtcccggcatgctcttctagaaccgcctcaaccgtcagcactccgtctagtgaaaccaattacggcggtacagttgcggttacgactcctcaacctctagaaggccgtccaattcatcagagaatctcatcttcaattctcaccaactcatcaaacaatctcaacctcgaactccaacttcttccattatcgtcgaatcaaaaccctaatcaagaaaaccaacaacaaaaagttaaagaaccatctcatcatcataatcataatcatgataccacaaacttaaacctctccattgcaccatcatcatcatatcaacattacaacaactttgatcgtataaaagagattatggcgagcgagcaaattatgaagatagcgatgaaggagaaagcttacgctgaggaagctaaaagagaagccaagaggcaacgagagatagcggaaaacgagtttgcaaatgccaaaaagattaggcaaaaagcacaagctgaactcgagagagctaagtttttaaaggaacaatctatgaagaagataagttcaacgatcatgcaggtcacttgtcaaacatgtaaaggacagtttcaagcagttgcggttccggcggctacggctgatgagacgtctcttgtcgtgagttacatgtcgtcagcgaatactgacggagagttggaaaatggtttttaa

SEQ ID NO: 178 - protein, 439 aa, Arabidopsis thaliana
  G1880 Polypeptide (domain in aa coordinates: 69-89, 111-139)
MLSNKNTNTCCVVSSSSSDPFLSSSENGVTTTNTSTQKRKRRPAGTPDPDAEVVSLSPRTLLESDRYICEICNQGFQRDQNLQMHRRRHKVPWKLLKRDNNIEVKKRVYVCPEPTCLHHNPCHALGDLVGIKKHFRRKHSNHKQWVCERCSKGYAVQSDYKAHLKTCGTRGHSCDCGRVFSRVESFIEHQDNCSARRVHREPPRPPQTAVTVPACSSRTASTVSTPSSETNYGGTVAVTTPQPLEGRPIHQRISSSILTNSSNNLNLELQLLPLSSNQNPNQENQQQKVKEPSHHHNHNHDTTNLNLSIAPSSSYQHYNNFDRIKEIMASEQIMKIAMKEKAYAEEAKREAKRQREIAENEFANAKKIRQKAQAELERAKFLKEQSMKKISSTIMQVTCQTCKGQFQAVAVPAATADETSLVVSYMSSANTDGELENGF

SEQ ID NO: 179 - DNA, 1521 bp, Arabidopsis thaliana
  G1919
atggagtacgatggacggagaccctactctgttctaacgagaaatgaaattaccgtaaagatgaagaaacagatcaatgaaatctctgacatcttcttcatatcaaactccgatgcgaccgtacttcttatgtatctccgatgggactcgcttcgtgtttcagagcgtttaggtgaaaacaaggagaaattattgatggattcaggtttgaaatcagtcatgatcgatcccagtccagattcatctagcgagattagcttggagactgatgtttatgagtttgatggtgataatgatttaatctccatgcccttttgttctcacaagttcgactcaaaatattggagagagtatcttgagaagaatttctactatgtggagaaaatccaaaccacaatctcttgtcctgatcaagattgtcgatctgcggttggaccagacacgattgagaaactaacagtacgtgatcaagagatgtacgagaggtacatttggagatcttacattgaaggaaacaaggtattgatgatcaaacagtgtcctgcacggaattgcgattatgttattgagtttcatcaagagaatgatgatgatgatgagtatagtttaaacgtggtgtgtatctgtggtcatatcttctgttggagatgcagacttgagtcacacagaccagtgagttgtaacaaggcctctgattggttgtgtagtgccacaatgaaaatatcagatgaatcatttagcctttatccgaccaaaaccaagacagtgacttgccctcattgcctctgttctctggagtctgatacaaaaatgccccagttcttgacttgtgtctgcaggcttcgtttctgttcgaggtgtttgcggtcagaggaagcccacaaaattgaagcagtagactctggattctgtattaaaacagaagtggggattttatgtgaggatcgctggaacgtgtgtcagaagttactggagcaagccaaatccgatctagaagctttcgaggaaaccaacatcaagaaaccgagtgacttattaagggagcaagacattatgattataagagaagggttgatgttgattgttcaatgcagacgagtccttaaatggtgttgtgtgtatgactatttccacacagagtatgagaactcgaaggagtatctacgatacctccaaggaaatgcaatcgccacgctccagagttactcaaacactttacaagagcaaaaagatatcgtcctcgctgcagctacttatgaagagtgtactttcttcagacatacgatacctactgcgacaagcaacattggtaactacttttatgattttatgaaaactttacaagatggtttggtcgatgtaaaggtgaagtcatacaacggcgggactggtcctttctggtactgtgatcgctgcacgtatgcaaacacttgggaggataatgagtgtgagatgtgctatgatgatagtgcctctcttgtgggagagataagtgatttgtttcttaacaaagtttcttaa

SEQ ID NO: 180 - protein, 506 aa, Arabidopsis thaliana
  G1919 Polypeptide (domain in AA coordinates:214-287)
MEYDGRRPYSVLTRNEITVKMKKQINEISDIFFISNSDATVLLMYLRWDSLRVSERLGENKEKLLMDSGLKSVMIDPSPDSSSEISLETDVYEFDGDNDLISMPFCSHKFDSKYWREYLEKNFYYVEKIQTTISCPDQDCRSAVGPDTIEKLTVRDQEMYERYIWRSYIEGNKVLMIKQCPARNCDYVIEFHQENDDDDEYSLNVVCICGHIFCWRCRLESHRPVSCNKASDWLCSATMKISDESFSLYPTKTKTVTCPHCLCSLESDTKMPQFLTCVCRLRFCSRCLRSEEAHKIEAVDSGFCIKTEVGILCEDRWNVCQKLLEQAKSDLEAFEETNIKKPSDLLREQDIMIIREGLMLIVQCRRVLKWCCVYDYFHTEYENSKEYLRYLQGNAIATLQSYSNTLQEQKDIVLAAATYEECTFFRHTIPTATSNIGNYFYDFMKTLQDGLVDVKVKSYNGGTGPFWYCDRCTYANTWEDNECEMCYDDSASLVGEISDLFLNKVS

SEQ ID NO: 181 - DNA, 955 bp, Arabidopsis thaliana
  G1936
tcgacccaccttgaatctgagagagagagagaagtacgtccccacaccttgacatggtcatggagcccaagaagaaccaaaatctaccaagtttcttaaacccatcacgacagaatcaggacaacgacaagaagaggaaacaaacagaggttaaaggtttcgacattgtggtcggcgaaaagaggaagaagaaggagaatgaagaggaagaccaagaaattcagattctttatgagaaggagaagaagaaaccaaacaaagatcgtcaccttaaagttgaaggaagaggtcgtagagttaggttacctccactctgtgcagcaaggatttatcaattgactaaagaattaggtcacaaatcagatggtgagactcttgaatggttgcttcaacatgctgagccatcgatactctctgctactgtaaatggtatcaaacccactgagtctgttgtttctcaacctcctctcacggctgatttgatgatttgtcatagcgttgaagaagcttcaaggactcaaatggaggcaaatgggttgtggagaaatgaaacaggacagaccattggagggtttgatctgaattacggaattgggtttgatttcaatggtgttccagagattggttttggagataatcaaacgcctggacttgaattaaggctgtctcaagttggggttttgaatccacaggtttttcaacaaatgggtaaagaacagttcagggttcttcatcatcattcacatgaagatcagcagcagagtgcagaggaaaatggttcataaagctcaaacctttaaatggcttttaattagatatatttagcgagaatgtgattgctagtgaaatctcaaacttgatagcttattcatagcttattttacttcgatcagcaagagaacaatggttcctaaagctcaaaccttttttggcgtttgctttagattgtgcatac

SEQ ID NO: 182 - protein, 243 aa, Arabidopsis thaliana
  G1936 Polypeptide (domain in AA coordinates:64-129);
MVMEPKKNQNLPSFLNPSRQNQDNDKKRKQTEVKGFDIVVGEKRKKKENEEEDQEIQILYEKEKKKPNKDRHLKVEGRGRRVRLPPLCAARIYQLTKELGHKSDGETLEWLLQHAEPSILSATVNGIKPTESVVSQPPLTADLMICHSVEEASRTQMEANGLWRNETGQTIGGFDLNYGIGFDFNGVPEIGFGDNQTPGLELRLSQVGVLNPQVFQQMGKEQFRVLHHHSHEDQQQSAEENGS

SEQ ID NO: 183 - DNA, 883 bp, Arabidopsis thaliana
  G1950
ctgaattcgaactttggaagaagaagaagctttgatcaatcatggaaattgcaaccgatacagcaaagcagatgagagacgaagagttgttcaaagcagcggaatggggagattcatcgttgttcatgtcattatctgaagaacagctctctaaatctctcaatttcagaaacgaagatggtcgctctctcctccatgtcgctgcttccttcggccattctcaaatagtgaagttgttatcaagttcagatgaagcaaagactgtaatcaatagcaaggatgatgaaggatgggctcctttgcattccgctgctagcatcggtaatgctgagctcgttgaggtgcttttgaccagaggtgctgatgtcaatgccaaaaataacggtggtcgcactgctcttcactatgctgctagcaaaggccggttggagattgctcagcttttattaacacacggtgcaaagattaacatcacagacaaggttggttgcactccgcttcacagggcagcaagcgtgggaaagttagaagtttgtgaatttcttattgaagaaggagcagagatcgatgctacggataaaatgggtcaaactgcactcatgcattcagttatctgcgatgacaaacaggttgcgttcctgcttataagacatggtgcagatgtggatgtagaagacaaggaaggctacactgttctaggccgagctaccaatgaattccgacctgcacttatcgatgctgctaaggccatgcttgaaggataaaatgactctggattactttaaaacttactaactctgagagttgtttagttacttaaaaggatttttctttactgtatcatgtttgcaaaatgtttctgccttatcaattcatgttctgt

SEQ ID NO: 184 - protein, 240 aa, Arabidopsis thaliana
  G1950 Polypeptide (domain in AA coordinates: 65-228)
MEIATDTAKQMRDEELFKAAEWGDSSLFMSLSEEQLSKSLNFRNEDGRSLLHVAASFGHSQIVKLLSSSDEAKTVINSKDDEGWAPLHSAASIGNAELVEVLLTRGADVNAKNNGGRTALHYAASKGRLEIAQLLLTHGAKINITDKVGCTPLHRAASVGKLEVCEFLIEEGAEIDATDKMGQTALMHSVICDDKQVAFLLIRHGADVDVEDKEGYTVLGRATNEFRPALIDAAKAMLEG

SEQ ID NO: 185 - DNA, 1026 bp, Arabidopsis thaliana
  G2069
atggaaggaggaggaagaggaccaaatcaaacgattctcagtgaaatagaacatatgcctgaagctccacgtcaacgtatctctcatcaccgtcgagctcgctctgaaaccttcttctccggcgaatcaatcgacgatctcctcttattcgatccttccgatatcgatttctcttctctagacttcctcaacgctccaccaccaccacaacaatcacaacaacaaccgcaagcttctcccatgtccgttgattcggaagaaacctcatcgaacggtgttgttcctcctaattctcttcctccaaaacccgaagctagattcggtcgccatgttcgtagcttctcggttgattccgatttcttcgatgatttgggtgttactgaggagaagtttatagctacaagttcaggagagaagaagaaagggaatcatcatcatagcaggagtaattctatggatggagagatgagttcggcgtcgtttaatatcgaatcgattttagcttctgtgagtggtaaagatagtgggaagaagaatatgggtatgggtggtgatagacttgctgagcttgctttgcttgatcctaaaagagctaaaaggattttagcgaatagacaatctgcggcgaggtcgaaagagaggaagattaggtatactggtgagttagagaggaaggttcagacacttcagaatgaagctactacattgtctgctcaagtcactatgttacagagaggaacatcagagctgaacactgaaaataaacacctcaaaatgcggcttcaagctttagagcaacaagctgaacttagggatgctttgaatgaagcgctgcgggatgaactgaaccgacttaaggtggtagctggagaaattcctcaggggaatggaaattcttacaaccgtgctcaattctcatctcagcaatcggcaatgaatcagtttgggaacaaaacgaaccaacagatgagtacaaacgggcagccatcgctcccaagctacatggatttcaccaagagaggctga

SEQ ID NO: 186 - protein, 341 aa, Arabidopsis thaliana
  G2069 Polypeptide (domain in AA coordinates: to be determined)
MEGGGRGPNQTILSEIEHMPEAPRQRISHHRRARSETFFSGESIDDLLLFDPSDIDFSSLDFLNAPPPPQQSQQQPQASPMSVDSEETSSNGVVPPNSLPPKPEARFGRHVRSFSVDSDFFDDLGVTEEKFIATSSGEKKKGNHHHSRSNSMDGEMSSASFNIESILASVSGKDSGKKNMGMGGDRLAELALLDPKRAKRILANRQSAARSKERKIRYTGELERKVQTLQNEATTLSAQVTMLQRGTSELNTENKHLKMRLQALEQQAELRDALNEALRDELNRLKVVAGEIPQGNGNSYNRAQFSSQQSAMNQFGNKTNQQMSTNGQPSLPSYMDFTKRG

SEQ ID NO: 187 - DNA, 1107 bp, Arabidopsis thaliana
  G207
aaaagatctgtttcaatggcggatcgtgttaaaggtccatggagtcaagaagaagatgagcagctacgaaggatggttgagaaatacggaccgaggaattggtctgcgattagcaaatcgattccaggtcgatctggtaaatcgtgtagattacgttggtgtaatcagttatctccggaggttgagcatcgtcctttctcgccggaggaagatgagactattgtaaccgcccgtgctcagtttggtaacaagtgggcgacgattgctcgtcttcttaacggtcgtacggataacgccgttaaaaatcactggaactctacgcttaagaggaaatgcagcggaggtgtggcggttacgacggtgacggagacggaggaagatcaggatcggccgaagaagaggagatctgttagctttgatcctgcttttgctccggtggatactggattgtacatgagtcctgagagtcctaacggaatcgatgttagtgattctagcacgattccgtcaccgtcgtctcctgttgctcagctgtttaaaccaatgccgatttccggcggttttacggtggttccgcagccgttaccggttgaaatgtcttcgtcttcggaggatccacctacttcgttgagtttgtcactacctggagctgagaacacgagttcgagccataacaataacaacaacgcgttgatgtttccgagatttgagagtcagatgaagattaatgtagaggagagaggaggaggaggagaaggacgtagaggtgagtttatgacggtggtgcaggagatgataaaagctgaagtgaggagttacatggcggaaatgcagaaaacaagtggtggattcgtcgtcggaggtttatacgaatccggcggcaatggtggttttagggattgtggagtaataacacctaaggttgagtagttttggtttagggttaaaacttgaatcgattggggattttcaagagcattcatttttggggtttatggtaaaattaaaaacaaaaacaaaatgtacagaggaattaaaatttctatggaataatcttaaatctcaaatatttgttacttgttttggtgattcataaccaaaatcaaa

SEQ ID NO: 188 - protein, 304 aa, Arabidopsis thaliana
  G207 Polypeptide (domain in AA coordinates: 6-106)
MADRVKGPWSQEEDEQLRRMVEKYGPRNWSAISKSIPGRSGKSCRLRWCNQLSPEVEHRPFSPEEDETIVTARAQFGNKWATIARLLNGRTDNAVKNHWNSTLKRKCSGGVAVTTVTETEEDQDRPKKRRSVSFDPAFAPVDTGLYMSPESPNGIDVSDSSTIPSPSSPVAQLFKPMPISGGFTVVPQPLPVEMSSSSEDPPTSLSLSLPGAENTSSSHNNNNNALMFPRFESQMKINVEERGGGGEGRRGEFMTVVQEMIKAEVRSYMAEMQKTSGGFVVGGLYESGGNGGFRDCGVITPKVE

SEQ ID NO: 189 - DNA, 1001 bp, Arabidopsis thaliana
  G2380
tggcgacgccttcgccgacctcctctcctccctctgattcaaaccctaattctgccgctactccgccgcatcagaaacaaccaccctctcctcctcaacccacgaatccatcctctccaccaccgcacaccaccgtcgtagctttagccgcatcaacctccgccgtcgccagaaaaacccaacctgttctctggactcaagacgagaccctcctcttaatcgaatcatacaaagagaaatggttcgcaattggtcgtggtcctctaaaatcaactcactgggaagagatcgccgttgctgcctcatctcgttccggcgttgaacggacatctacacagtgtaggcataagatcgagaagatgcgtaaaagattccgatctgagagacagagtatgggacctatctcaatttggcctttctataatcaaatggaggaattggattcttcaaatcctgctccgatctcagctcgtcctctcactcgtcttcctcctaattcgaataatcgctacgtagacgacgaagaagaagatgaagaagaggataacaataactacgaagaagaggaagaagaagatgagagacagagcaaatcgaggagtattaattacatattgagaagacctggaactgttaacagatttgctggagttggtggaggattgttgtcatggggacaaaaagagagatcatcgaagaggaagaggaacgatggagacggtggtgagaggcggaggaaaggaatgcgagccgttgcagcggagattagggcgtttgctgagagagtaatggtaatggagaagaagaagattgagtttgctaaagagactgtgagacttcgtaaggaaatggagattcgtagaatcaatttgattcagagttctcaaactcagcttcttcaatttatcaacaatgcttttgattctttctaacgtagagatttagtcattgttgcttttagatttgtaacataggtaacggatttgaagaaatgcactatg

SEQ ID NO: 190 - protein, 190 aa, Arabidopsis thaliana
  G2380 Polypeptide (domain in AA coordinates: 107-181)
MRKRFRSERQSMGPISIWPFYNQMEELDSSNPAPISARPLTRLPPNSNNRYVDDEEEDEEEDNNNYEEEEEEDERQSKSRSINYILRRPGTVNRFAGVGGGLLSWGQKERSSKRKRNDGDGGERRRKGMRAVAAEIRAFAERVMVMEKKKIEFAKETVRLRKEMEIRRINLIQSSQTQLLQFINNAFDSF

SEQ ID NO: 191 - DNA, 1317 bp, Arabidopsis thaliana
  G248
tcgacagttggtgtttaaatggaattctcattgatctccgatgaaaatttcatcttaaacgatgctcatcgatgtcctgttaatgatgatgcatcgcatataccaaaaaataatcttaactttttcaatgacaatttaggtcaatcttctcgtactggatggtctttttcaccagatctgactgatatctctaatcagcaccaccaaaatcttatacctttgatcccaaattatgattctcaaaatcagaatttggatactaatcaaaaccatttggtttacaactcttcctcctatgaaattccatcaaactacccattcatgagtatcaaatcctactcaaatattgatactcttgagcaatctatgaataacatagtcaacaacggaaaaatccatatgatcgataatcccccaatttttgcaaaccctaagggtatattcgaaaattttcatgatttgcaggaatacactatagggaatgagattgtacacaatgaagaactgactaataagggttatgagccaactcttgataaggtaatgggtgaacctcaattatttgatgtgccagtgctagaaggtatcaaaaatacaaccaacgaaatcatgaatcaacttgaagatgataagatgaaaaaaacttatgagaataaaaaggaggcgagcacaagcaaatatttgaagaaaagtgacatcaccaaaaaaagatggacagaatctgaggacataaaattgaaagagatggtggcacttgaacccaaaaaatggacaaaggtcgcaaaacattttgaaggacgaacaccaaaacaatgcagagagaggtggcataaccatgctcgtcctaacgttaagaaaactacttggagtgaagaagaagatcaaatactaattgaagtacacaaagtaattggtgccaaatggatccagatctcagagcaacttccggggaggagctataacaatgttaagaaccattggaataccacaaagcgtcgggtgcaaaataaaagtggtcgaactgtcaaccgtgtcggcaataacatccttgaaaactacataaggagtatcacaatcaacaacgatgatgaatctgatggtgaaccgacaaacattgagaattatcatgatgactctgaagatatgttatatggggagatgaatttgagtccagaggctataacgcagaccaccaaaccattgaccgatgcttctacaatatcaccttatattccgatgccaaaagaaaactatactctggaggtttgtgaatcactggaggactatctagagctgctgcgttggtgggattaatgc

SEQ ID NO: 192 - protein, 431 aa, Arabidopsis thaliana
  G248 Polypeptide (domain in AA coordinates: 264-332)
MEFSLISDENFILNDAHRCPVNDDASHIPKNNLNFFNDNLGQSSRTGWSFSPDLTDISNQHHQNLIPLIPNYDSQNQNLDTNQNHLVYNSSSYEIPSNYPFMSIKSYSNIDTLEQSMNNIVNNGKIHMIDNPPIFANPKGIFENFHDLQEYTIGNEIVHNEELTNKGYEPTLDKVMGEPQLFDVPVLEGIKNTTNEIMNQLEDDKMKKTYENKKEASTSKYLKKSDITKKRWTESEDIKLKEMVALEPKKWTKVAKHFEGRTPKQCRERWHNHARPNVKKTTWSEEEDQILIEVHKVIGAKWIQISEQLPGRSYNNVKNHWNTTKRRVQNKSGRTVNRVGNNILENYIRSITINNDDESDGEPTNIENYHDDSEDMLYGEMNLSPEAITQTTKPLTDASTISPYIPMPKENYTLEVCESLEDYLELLRWWD

SEQ ID NO: 193 - DNA, 1167 bp, Arabidopsis thaliana
  G2555
ctgtttttgtatccgtgtaaattaatcacacggtagtttttgatgaaaagacaacaatcggagaacaatctggtctgctgctaaaatttaataaattgttttgtctaattgtctccacccataaaaaagcgcgaattcaattcaccgactaaagacattctccggtggagaccccgatgcaatccactcatataagcggcggaagtagcggtggtggtggtggaggaggaggagaggtgagtcgaagtggattatctcggatccgttcagctccagctacttggattgaaaccctactcgaagaagatgaagaagaaggtttaaaacctaacctttgtttaacagagctgcttactggtaataataactctggaggagtgataacgagtcgtgacgactcgttcgagttcctgagttctgttgagcaaggattgtataatcatcatcaaggtggtggctttcaccgtcagaatagttctccggctgattttcttagtgggtctggttctgggactgatgggtatttctctaattttggtattccggcgaattatgactatttgtcgaccaacgttgatatttctccgactaaacggtctagagatatggaaacacagttttcttctcagctgaaagaagagcaaatgagtggtgggatatcaggaatgatggatatgaacatggacaagatttttgaggattcagttccttgtagggttcgtgctaaacgtggttgtgctactcatcctcgtagcattgctgaacgggtgagaagaacgcgaataagtgatcggattaggaggctgcaagagcttgttcctaacatggataagcaaaccaacactgcagacatgttggaagaagctgtggagtatgtgaaggctcttcaaagccagatccaggaattgacagagcagcagaagagatgcaaatgcaaacctaaagaagaacaataatgtatcctttaggatttgatatatctgtattttatttttgtactatctaaaaatggtgatgatctgttcgaaaattcgaaacatgatcttatatattgaactagaaaaaatagatatatatgaattttagctgtaaaatttttgtacaataaggagaaaaagatttagaagagtcaataaaaagatgatgtttacaagtcaaaaaaaaaaa

SEQ ID NO: 194 - protein, 259 aa, Arabidopsis thaliana
  G2555 Polypeptide (domain in AA coordinates: 175-245)
MQSTHISGGSSGGGGGGGGEVSRSGLSRIRSAPATWIETLLEEDEEEGLKPNLCLTELLTGNNNSGGVITSRDDSFEFLSSVEQGLYNHHQGGGFHRQNSSPADFLSGSGSGTDGYFSNFGIPANYDYLSTNVDISPTKRSRDMETQFSSQLKEEQMSGGISGMMDMNMDKIFEDSVPCRVRAKRGCATHPRSIAERVRRTRISDRIRRLQELVPNMDKQTNTADMLEEAVEYVKALQSQIQELTEQQKRCKCKPKEEQ

SEQ ID NO: 195 - DNA, 964 bp, Arabidopsis thaliana
  G28
gaaatctcaacaagaaccaaaccaaacaacaaaaaaacattcttaataattatctttctgttatgtcgatgacggcggattctcaatctgattatgcttttcttgagtccatacgacgacacttactaggagaatcggagccgatactcagtgagtcgacagcgagttcggttactcaatcttgtgtaaccggtcagagcattaaaccggtgtacggacgaaaccctagctttagcaaactgtatccttgcttcaccgagagctggggagatttgccgttgaaagaaaacgattctgaggatatgttagtttacggtatcctcaacgacgcctttcacggcggttgggagccgtcttcttcgtcttccgacgaagatcgtagctctttcccgagtgttaagatcgagactccggagagtttcgcggcggtggattctgttccggtcaagaaggagaagacgagtcctgtttcggcggcggtgacggcggcgaagggaaagcattatagaggagtgagacaaaggccgtgggggaaatttgcggcggagattagagatccggcgaagaacggagctagggtttggttaggaacgtttgagacggcggaggacgcggcgttggcttacgacagagctgctttcaggatgcgtggttcccgcgctttgttgaattttccgttgagagttaattcaggagaacccgacccggttcgaatcaagtccaagagatcttctttttcttcttctaacgagaacggagctccgaagaagaggagaacggtggccgccggtggtggaatggataagggattgacggtgaagtgcgaggttgttgaagtggcacgtggcgatcgtttattggttttataattttgatttttctttgttggatgattatatgattcttcaaaaaagaagaacgttaataaaaaaattcgtttattattaaaaaaaaaaaaaaaaaa

SEQ ID NO: 196 - protein, 268 aa, Arabidopsis thaliana
  G28 Polypeptide (domain in AA coordinates: 145-213)
MSMTADSQSDYAFLESIRRHLLGESEPILSESTASSVTQSCVTGQSIKPVYGRNPSFSKLYPCFTESWGDLPLKENDSEDMLVYGILNDAFHGGWEPSSSSSDEDRSSFPSVKIETPESFAAVDSVPVKKEKTSPVSAAVTAAKGKHYRGVRQRPWGKFAAEIRDPAKNGARVWLGTFETAEDAALAYDRAAFRMRGSRALLNFPLRVNSGEPDPVRIKSKRSSFSSSNENGAPKKRRTVAAGGGMDKGLTVKCEVVEVARGDRLLVL

SEQ ID NO: 197 - DNA, 582 bp, Arabidopsis thaliana
  G371
atggagattgagaaggatgaggacgacacaacattggttgattctggaggagacttcgactgcaacatatgtttggatcaggttcgagacccggtcgtgactttatgtggccacctgttttgttggccctgcattcacaagtggacttatgcgtccaacaattcaagacaacgagtcgatcaatacgatcataagagggaaccaccaaaatgtccggtatgcaaatctgatgtctccgaggctacgcttgtcccgatctacggacgaggacagaaagctccccagtccggttcaaatgtaccgagcagaccaactggtccggtttatgacttaagaggagttggtcaacgtttaggagaaggggagagtcaacgttacatgtatagaatgcctgatccggtgatgggtgtggtatgcgaaatggtataccggagactatttggagagtcttcgagcaacatggcaccttaccgcgatatgaatgtccggtctaggcgacgggcaatgcaggctgaggagtcattaagcagagtctacttgtttctactttgcttcatgtttatgtgtctatttctcttctaa

SEQ ID NO: 198 - protein, 193 aa, Arabidopsis thaliana
  G371 Polypeptide (domain in aa coordinates: 21-74)
MEIEKDEDDTTLVDSGGDFDCNICLDQVRDPVVTLCGHLFCWPCIHKWTYASNNSRQRVDQYDHKREPPKCPVCKSDVSEATLVPIYGRGQKAPQSGSNVPSRPTGPVYDLRGVGQRLGEGESQRYMYRMPDPVMGVVCEMVYRRLFGESSSNMAPYRDMNVRSRRRAMQAEESLSRVYLFLLCFMFMCLFLF

SEQ ID NO: 199 - DNA, 952 bp, Arabidopsis thaliana
  G812
tcgaaatcatcaagaatcttgtctttaatttccaattgggtttttcaaaacccgttacctcaggatgatgaacccgtttctcccggaaggctgcgatccaccaccaccaccacaaccaatggagggtttacacgaaaatgctccacctccatttctgaccaagacatttgagatggtggatgatccaaacactgaccacatcgtatcttggaacagaggaggaacaagttttgtcgtctgggatttgcattctttctccacgattctccttcctcgtcatttcaaacacagcaatttctcaagtttcatcagacaactcaatacttatggtttcagaaagatagaagcagagagatgggaatttgcaaacgaagagtttttgttaggacaaagacagttgttgaagaacatcaagaggagaaacccttttactccatcatcttcaccaagccatgacgcttgcaacgagcttcgcagagagaagcaagtgctaatgatggagatagtgagtctaagacagcagcaacaaacaacgaaaagctacatcaaagctatggaacagaggatagaaggaacagagaggaaacagagacaaatgatgtcgtttctggctagagcaatgcagagtccttcgtttttgcatcagttgttgaaacaaagagataaaaaaattaaggagcttgaggataatgagtcagcaaagaggaaaagaggttcttcttcgatgtcggaattggaagttttggctttggagatgcaagggcatggaaaacagaggaatatgttggaagaagaggatcatcaactggtggtagagagagagttggatgatggtttctgggaagagttgcttagtgatgagagtttggcttccacctcctaactagatggatttctttttggttttgtttttagtttcttctactttcaagctcattttcttctgtcacaa

SEQ ID NO: 200 - protein, 272 aa, Arabidopsis thaliana
  G812 Polypeptide (domain in AA coordinates: 31-120)
MMNPFLPEGCDPPPPPQPMEGLHENAPPPFLTKTFEMVDDPNTDHIVSWNRGGTSFVVWDLHSFSTILLPRHFKHSNFSSFIRQLNTYGFRKIEAERWEFANEEFLLGQRQLLKNIKRRNPFTPSSSPSHDACNELRREKQVLMMEIVSLRQQQQTTKSYIKAMEQRIEGTERKQRQMMSFLARAMQSPSFLHQLLKQRDKKIKELEDNESAKRKRGSSSMSELEVLALEMQGHGKQRNMLEEEDHQLVVERELDDGFWEELLSDESLASTS

SEQ ID NO: 201 - DNA, 1126 bp, Arabidopsis thaliana
  G865
atccccacttgttgttcatcaccaagccaagctccatgtcctagtcactccacagattccctatcatcatcaattcgtttcaaacttagttcctttcaaagtcttgtacatatatacacacacacctattattctcttggtgtgtttgtgtgttacatatacgtgtgagtacatactttgttgtaaaagtggatcggaggtatggaaagggaccggttccaccggaaacatcggcggcggcggatgataattcgtcttggaacgagactgatgtcaccgccatggtctccgctctcagccgtgtcatagagaatccgacagacccgccggtcaaacaagagcttgataaatcggatcaacatcaaccagaccaagatcaaccaagaagaagacactatagaggcgtaaggcagagaccatggggtaaatgggcggcagaaatccgcgatccaaagaaagcagcccgtgtctggctcgggactttcgagacggcagaggaagctgctttagcctatgaccgagctgccctcaaattcaaaggcaccaaggctaaactgaacttccctgaacgggtccaaggccctactaccaccacaaccatttctcatgcaccaagaggagttagtgaatccatgaactcacctcctcctcgacctggtccaccttcaactactactacttcgtggccaatgacttataaccaggacatacttcaatacgctcagttgcttacgagtaacaatgaggttgatttatcatactacacgtcgactctcttcagtcaacctttttcaacgccttcttcatcttcttcttcctcccaacagacgcagcaacagcagctacaacaacaacaacagcagcgtgaagaagaagagaagaattatggttacaattattataactacccaagagaataatctaattattattgttggtcgaatcagttttataaatagctatcatagtttcatttttggtttccgtaacctttgttgcatggaaaatatgaatgaacgagggacatgtgtaacaatttgtttgtgtttcgtaaatgttagttgtatttggatttgctgaagtttgattttctgagcataaatcatttgacggtcaaaaaaaaaaa

SEQ ID NO: 202 - protein, 212 aa, Arabidopsis thaliana
  G865 Polypeptide (domain in AA coordinates: 36-103)
MVSALSRVIENPTDPPVKQELDKSDQHQPDQDQPRRRHYRGVRQRPWGKWAAEIRDPKKAARVWLGTFETAEEAALAYDRAALKFKGTKAKLNFPERVQGPTTTTTISHAPRGVSESMNSPPPRPGPPSTTTTSWPMTYNQDILQYAQLLTSNNEVDLSYYTSTLFSQPFSTPSSSSSSSQQTQQQQLQQQQQQREEEEKNYGYNYYNYPRE

SEQ ID NO: 203 - DNA, 2057 bp, Arabidopsis thaliana
  G940
ttcccctgagaacgacaggagaaagaataaaaaccctaaatttctttaatttcggcgcttcagattatcgttgttaaaggtttttgattgattttgtttaaatgggcgatcttgctatgtccgtagcagacatcaggatggagaatgagcctgatgatttagctagtgataatgttgctgagattgatgtgagtgatgaagagattgatgctgacgaccttgagagacggatgtggaaagatcgtgtcaggcttaaaagaatcaaagagcgacaaaaagctggctctcaaggagctcaaacgaaggagacacctaagaaaatctctgatcaagctcagaggaagaaaatgtctagagctcaagatggtatccttaagtacatgttgaagcttatggaagtctgcaaagttcgcgggtttgtctatggtataataccggaaaagggcaagcctgtgagtggttcctctgacaatataagagcttggtggaaagagaaagtgaagtttgataagaacggtcctgctgctattgctaaatacgaagaggagtgtttagcgtttgggaaatctgatgggaataggaattcacagtttgttctccaggatttgcaagatgctactttagggtctttgttatcttctttgatgcaacattgtgatcctcctcaaaggaagtatccgttggagaaagggacgcctccgccttggtggccaacggggaatgaagaatggtgggtgaaactcggtctgcctaaaagccagagtcctccttaccgaaaacctcatgatctcaagaagatgtggaaggttggagttttaacggcagtgatcaatcatatgttacctgatattgcaaagattaagaggcatgttcgtcagtcgaaatgtttacaggacaagatgacagctaaagagagtgcgatttggttggcggttttgaaccaagaggaatctttgattcagcagcctagcagtgacaatggaaactccaatgtgactgagacacatcgtaggggtaataacgctgacaggaggaaacctgtggtcaacagtgacagtgactatgatgttgatgggacagaggaagcttcaggttcagtttcatctaaagacagtagaagaaatcagattcaaaaagaacaaccaacagccatctcacattcagtaagagatcaagataaagcagagaaacatcgcagaaggaaaagacctcgaattagatccggaactgtcaatcgacaagaggaagaacaacctgaagctcaacaaagaaacatcttacctgatatgaatcatgttgatgcccctctgctagaatataacatcaacggtactcatcaagaggacgatgttgtcgacccaaatattgccttaggaccagaggataatggtctggaactagtggttcctgagttcaataacaactatacttatcttccacttgttaatgaacaaactatgatgcctgtagacgaaaggccaatgctttatggaccaaaccctaaccaagagcttcaatttgggtcagggtacaacttctacaatccctctgcagtgtttgtacataaccaggaagacgacattctccatacacagatagaaatgaatacacaagcaccacctcacaacagtgggttcgaggaggccccaggaggagtacttcaaccccttggtttactcggaaatgaagacggtgtaacagggagtgagttgcctcagtatcagagtggcattctgtctccattgactgacttggactttgactatggtggttttggtgatgatttctcatggtttggagcttagtgtcttgccattttttttgggagattacatagttcaaaaggacatggcaatagtctggctagtacagttactttctcttcttcatttcttctgatcttatattcttcctctttttttcttataatattttcttagatttgttaagagaaacaattttccttttgaataagttgccagaagaactgctttgcccgttgtaatggtctctagggaaagcagttagcgtatcatcatttgtaaatttactgtgag

SEQ ID NO: 204 - protein, 567 aa, Arabidopsis thaliana
  G940 Polypeptide (domain in AA coordinates: 86-96)
MGDLAMSVADIRMENEPDDLASDNVAEIDVSDEEIDADDLERRMWKDRVRLKRIKERQKAGSQGAQTKETPKKISDQAQRKKMSRAQDGILKYMLKLMEVCKVRGFVYGIIPEKGKPVSGSSDNIRAWWKEKVKFDKNGPAAIAKYEEECLAFGKSDGNRNSQFVLQDLQDATLGSLLSSLMQHCDPPQRKYPLEKGTPPPWWPTGNEEWWVKLGLPKSQSPPYRKPHDLKKMWKVGVLTAVINHMLPDIAKIKRHVRQSKCLQDKMTAKESAIWLAVLNQEESLIQQPSSDNGNSNVTETHRRGNNADRRKPVVNSDSDYDVDGTEEASGSVSSKDSRRNQIQKEQPTAISHSVRDQDKAEKHRRRKRPRIRSGTVNRQEEEQPEAQQRNILPDMNHVDAPLLEYNINGTHQEDDVVDPNIALGPEDNGLELVVPEFNNNYTYLPLVNEQTMMPVDERPMLYGPNPNQELQFGSGYNFYNPSAVFVHNQEDDILHTQIEMNTQAPPHNSGFEEAPGGVLQPLGLLGNEDGVTGSELPQYQSGILSPLTDLDFDYGGFGDDFSWFGA

SEQ ID NO: 205 - DNA, 1638 bp, Arabidopsis thaliana
  G558
ggaatttcggatcgtgtctctctctgtttctttgtttcaatccgatttcgaatcaagccctttacttgtgcaccttcaagatttcgttttttccagcgcccagaatgctccgggtgaccaacatttgttcctgattcatttcctattggttcgtattgtctgtgcacacaagagaaatttcaagaagttgttactaaaagagaggccacaagtggatattgtctttgttatcaagtgttagtacagaaaagtggtgagaaagtaatatggctgataccagtccgagaactgatgtctcaacagatgacgacacagatcatcctgatcttgggtcggagggagcactagtgaatactgctgcttctgattcgagtgaccgatcgaagggaaagatggatcaaaagactcttcgtaggcttgctcaaaaccgtgaggcagcaaggaaaagcagattgaggaagaaggcttatgttcagcagctagagaacagccgcttgaaactaacccagcttgagcaggagctgcaaagagcaagacagcagggcgtcttcatttcaggcacaggagaccaggcccattctactggtggaaatggtgctttggcgtttgatgctgaacattcacggtggttggaagaaaagaacaagcaaatgaacgagctgaggtctgctctgaatgcgcatgcaggtgattctgagcttcgaataatagtcgatggtgtgatggctcactatgaggagcttttcaggataaagagcaatgcagctaagaatgatgtctttcacttgctatctggcatgtggaaaacaccagctgagagatgtttcttgtggctcggtggatttcgttcatccgaacttctaaagcttctggcgaatcagttggagccaatgacagagagacagttgatgggcataaataacctgcaacagacatcgcagcaggctgaagatgctttgtctcaagggatggagagcttacaacagtcactagctgatactttatcgagcgggactcttggttcaagttcatcagggaatgtcgcaagctacatgggtcagatggccatggcaatgggaaagttaggtacactcgaaggatttatccgccaggctgataatttgagactacaaacattgcaacagatgataagagtattaacaacgagacagtcagcacgtgctctacttgcaatacacgattacttctcacggctacgagctctaagctccttatggcttgctcgacccagagagtgaaactgtattttggtcacatgtcagctgtacaaaatccatatggacacaaaaccaggagagactattaatcaacacttgtcagattcttcttaccaaatccatcaacaaataagcaaatttctgggaaacaaaagactctttgtatgtaggtttcttctacatggttgtggtaattcatgttgttttagttgtagtcatcagtttttaatttagcatttgaaaagttcaatgttgtttatatagcatcttcgattatcttagaaaggttattgaattttgtttttttttgttacttttgtgtgtggtaaaggtgttttaaccttgcaacttctgtactgtaatcatttaacaatattaagatgttctatttgagttttgt

SEQ ID NO: 206 - protein, 330 aa, Arabidopsis thaliana
  G558 Polypeptide (domain in AA coordinates: 45-105)
MADTSPRTDVSTDDDTDHPDLGSEGALVNTAASDSSDRSKGKMDQKTLRRLAQNREAARKSRLRKKAYVQQLENSRLKLTQLEQELQRARQQGVFISGTGDQAHSTGGNGALAFDAEHSRWLEEKNKQMNELRSALNAHAGDSELRIIVDGVMAHYEELFRIKSNAAKNDVFHLLSGMWKTPAERCFLWLGGFRSSELLKLLANQLEPMTERQLMGINNLQQTSQQAEDALSQGMESLQQSLADTLSSGTLGSSSSGNVASYMGQMAMAMGKLGTLEGFIRQADNLRLQTLQQMIRVLTTRQSARALLAIHDYFSRLRALSSLWLARPRE

SEQ ID NO: 207 - DNA, 1370 bp, Arabidopsis thaliana
  G569
gtcgacccacgcgtccgggtttttcttttatcctcttatcgctaatctggagctctatatagactataaagggtttttgattgattcgggagctcgagatttgacttcttttagctgattcggcaagtttgtatctagaaaggatcgattggtgaggtcaatagtggttggtgggttttagtaatggaagacggtgagcttgatttctccaatcaggaagtgttttcgagttcggagatgggtgaattaccacctagcaattgttcgatggatagtttctttgatgggcttttaatggatactaatgctgcttgtacccacactcacacctgtaaccccactggaccagagaacactcatactcacacgtgcttccatgtccacaccaagattctcccggatgagagcgatgaaaaagtttctactgatgatacagctgagtcttgtgggaagaagggtgaaaagagacctttgggaaaccgggaagcggttagaaagtatagagagaagaagaaggctaaagctgcttctttggaggatgaggttgcaaggcttagggcggtgaatcagcagctggtgaagaggttgcaaaatcaggctaccttggaagctgaggtttcgaggcttaagtgtttgcttgtggatttgagaggaagaatagatggagagattggatcttttccttatcagaaacctatggctgcaaatattccttctttctcgcacatgatgaatccttgtaatgtacaatgtgatgatgaagtttattgccctcagaatgtgtttggagtgaatagccaagaaggtgcctcgatcaatgaccaagggttaagtggttgtgattttgatcagctacaatgcatggctaatcagaacttaaatggaaatggaaacggatcattcagcaacgtcaatacatctgtctcgaataagagaaaaggtgggcatcgtgcatcaagagcagtttgaagcatcatcaagcttgtactatctatttccaccagcatagatattgtattccaaataagttgtagagttcagctgcaggatcagcttcgctcagctttgaggggttggtggtgtggtctttctttgtggcacgagtgagatctatggacagaacccagatttagtagtagtagaggcaggatttcgacttccactaaccatcatgttgcttggtgaagaacaaggtatgcccatgaagcacactgttttgtacattgagcttgaggggctgtctctgatctagccttactgtaacattgcaacgttctcacaattgtgatcccaagttgctttgttgacttaaatgtgataatatagcttaacttttacttgaaaaaaaaaaaaaaaaaaaaaaaaaaaaa

SEQ ID NO: 208 - protein, 261 aa, Arabidopsis thaliana
  G569 Polypeptide (domain in AA coordinates: 90-153)
MEDGELDFSNQEVFSSSEMGELPPSNCSMDSFFDGLLMDTNAACTHTHTCNPTGPENTHTHTCFHVHTKILPDESDEKVSTDDTAESCGKKGEKRPLGNREAVRKYREKKKAKAASLEDEVARLRAVNQQLVKRLQNQATLEAEVSRLKCLLVDLRGRIDGEIGSFPYQKPMAANIPSFSHMMNPCNVQCDDEVYCPQNVFGVNSQEGASINDQGLSGCDFDQLQCMANQNLNGNGNGSFSNVNTSVSNKRKGGHRASRAV

SEQ ID NO: 209 - DNA, 859 bp, Arabidopsis thaliana
  G1266
caatccactaacgatccctaaccgaaaacagagtagtcaagaaacagagtattttttctacatggatccatttttaattcagtccccattctccggcttctcaccggaatattctatcggatcttctccagattctttctcatcctcttcttctaacaattactctcttcccttcaacgagaacgactcagaggaaatgtttctctacggtctaatcgagcagtccacgcaacaaacctatattgactcggatagtcaagaccttccgatcaaatccgtaagctcaagaaagtcagagaagtcttacagaggcgtaagacgacggccatgggggaaattcgcggcggagataagagattcgactagaaacggtattagggtttggctcgggacgttcgaaagcgcggaagaggcggctttagcctacgatcaagctgctttctcgatgagagggtcctcggcgattctcaatttttcggcggagagagttcaagagtcgctttcggagattaaatatacctacgaggatggttgttctccggttgtggcgttgaagaggaaacactcgatgagacggagaatgaccaataagaagacgaaagatagtgactttgatcaccgctccgtgaagttagataatgtagttgtctttgaggatttgggagaacagtaccttgaggagcttttggggtcttctgaaaatagtgggacttggtgaaagattaggatttgtattagggaccttaagtttgaagtggttgattaattttaaccctaatatgttttttgtttgcttaaatatttgattctattgagaaacatcgaaaacagtttgtatgtacttttgtgatacttggcg

SEQ ID NO: 210 - protein, 218 aa, Arabidopsis thaliana
  G1266 Polypeptide (domain in AA coordinates: 79-147);
MDPFLIQSPFSGFSPEYSIGSSPDSFSSSSSNNYSLPFNENDSEEMFLYGLIEQSTQQTYIDSDSQDLPIKSVSSRKSEKSYRGVRRRPWGKFAAEIRDSTRNGIRVWLGTFESAEEAALAYDQAAFSMRGSSAILNFSAERVQESLSEIKYTYEDGCSPVVALKRKHSMRRRMTNKKTKDSDFDHRSVKLDNVVVFEDLGEQYLEELLGSSENSGTW

SEQ ID NO: 211 - DNA, 1055 bp, Arabidopsis thaliana
  G19
ataaaggcatttcagctccaccgtaggaaactttctcttgaaagaaacccacagcaacaaacagagaaaatgtgtggcggtgctattatttccgattatgcccctctcgtcaccaaggccaagggccgtaaactcacggctgaggaactctggtcagagctcgatgcttccgccgccgacgacttctggggtttctattccacctccaaactccatcccaccaaccaagttaacgtgaaagaggaggcagtgaagaaggagcaggcaacagagccggggaaacggaggaagaggaagaatgtttatagagggatacgtaagcgtccatggggaaaatgggcggctgagattcgagatccacgaaaaggtgttagagtttggcttggtacgttcaacacggcggaggaagctgccatggcttatgatgttgcggccaagcagatccgtggtgataaagccaagctcaacttcccagatctgcaccatcctcctcctcctaattatactcctccgccgtcatcgccacgatcaaccgatcagcctccggcgaagaaggtctgcgttgtctctcagagtgagagcgagttaagtcagccgagtttcccggtggagtgtataggatttggaaatggggacgagtttcagaacctgagttacggatttgagccggattatgatctgaaacagcagatatcgagcttggaatcgttccttgagctggacggtaacacggcggagcaaccgagtcagcttgatgagtccgtttccgaggtggatatgtggatgcttgatgatgtcattgcgtcgtatgagtaaaagaaaaaaaataagtttaaaaaaagttaaataaagtctgtaatatatatgtaaccgccgttacttttaaaaggtttttaccgtcgcattggactgctgatgatgtctgttgtgtaatgtgtagaatgtgaccaaatggacgttatattacggtttgtggtattattagtttcttagatggaaaaacttacatgtgtaaataagatttgtaatgtaagacgaagtacttataacttctt

SEQ ID NO: 212 - protein, 248 aa, Arabidopsis thaliana
  G19 Polypeptide (domain in AA coordinates: 76-145)
MCGGAIISDYAPLVTKAKGRKLTAEELWSELDASAADDFWGFYSTSKLHPTNQVNVKEEAVKKEQATEPGKRRKRKNVYRGIRKRPWGKWAAEIRDPRKGVRVWLGTFNTAEEAAMAYDVAAKQIRGDKAKLNFPDLHHPPPPNYTPPPSSPRSTDQPPAKKVCVVSQSESELSQPSFPVECIGFGNGDEFQNLSYGFEPDYDLKQQISSLESFLELDGNTAEQPSQLDESVSEVDMWMLDDVIASYE

SEQ ID NO: 213 - DNA, 920 bp, Arabidopsis thaliana
  G237
atggcgaagacgaaatatggagagagacataggaaagggttatggtcacctgaagaagacgagaagctaaggagcttcatcctctcttatggccattcttgctggaccactgttcccatcaaagctgggttacaaaggaatgggaagagctgcagattaagatggattaattacctaagaccagggttaaagagggatatgattagtgcagaagaagaagagactatcttgacgtttcattctcccttgggtaacaagtggtcgcaaatagctaaattcttaccgggaagaacagacaatgagataaagaactattggcactctcatttgaaaaagaaatggctcaagtctcagagcttacaagatgcaaaatctatttcccctccttcgtcttcatcatcatcacttgttgcttgtggagaaagaaatccggaaaccttgatctcgaatcacgtgttctccctccagagacttctagagaacaaatcttcatctccctcacaagaaagcaacggaaataacagccatcaatgttcttctgctcctgagattccaaggcttttcttctctgaatggctttcttcttcatatccccacaccgattattcctctgagtttaccgactctaagcacagtcaagctccaaatgtcgaagagactctctcagcttatgaagaaatgggtgatgttgatcagttccattacaacgaaatgatgatcaacaacagcaactggactcttaacgacattgtgtttggttccaaatgtaagaagcaggagcatcatatttatagagaggcttcagattgtaattcttctgctgaattcttttctccaccaacaacgacgtaaattgcgtttattgtaatgtaaatcaaatttctaaggcaaaaccggaaaaaaaaaaaaaaaaaaaaaaa

SEQ ID NO: 214 - protein, 283 aa, Arabidopsis thaliana
  G237 Polypeptide (domain in AA coordinates: 11-113)
MAKTKYGERHRKGLWSPEEDEKLRSFILSYGHSCWTTVPIKAGLQRNGKSCRLRWINYLRPGLKRDMISAEEEETILTFHSPLGNKWSQIAKFLPGRTDNEIKNYWHSHLKKKWLKSQSLQDAKSISPPSSSSSSLVACGERNPETLISNHVFSLQRLLENKSSSPSQESNGNNSHQCSSAPEIPRLFFSEWLSSSYPHTDYSSEFTDSKHSQAPNVEETLSAYEEMGDVDQFHYNEMMINNSNWTLNDIVFGSKCKKQEHHIYREASDCNSSAEFFSPPTTT

SEQ ID NO: 215 - DNA, 726 bp, Arabidopsis thaliana
  G378
atggcctcgtcatcatcatcatcttatagattccaatctgggtcttaccctctttcgtcaagtccttctcttgggaatttcgtcgaacgcattaaagacgcttgtcatttccttgtctctgctgttttgggtaccattatctccgcgatcttgaccttcttcttcgcactagtgggcacattgctaggggcacttacaggagctttgataggtcaagaaactgagagtggtttcattagaggagcagcaattggagccatttcgggagctgttttctctatcgaggtctttgaatcatctctggatctctggaaatccgatgagtcgggtttcggatgttttctctacttgattgatgtcattgttagtcttctaagcgggagacttgtacgagagcgcattggtcctgcaatgctaagtgcagtgcaaagtcaaatgggagctgtggatacagcttttgatgatcacacaagcctttttgatacaggaggctcaaaaggattgacaggagaccttgttgagaaaatcccaaagatgacaatcactggcaacaataacactgatgcttctgagaacacagactcatgttctgtttgtcttcaggatttccagctcggtgaaacagttagaagcttgcctcattgtcatcacatgtttcacttaccttgcatagacaattggctccttagacacggttcttgcccgatgtgtagacgtgatatttaa

SEQ ID NO: 216 - protein, 241 aa, Arabidopsis thaliana
  G378 Polypeptide (domain in AA coordinates: 196-237)
MASSSSSSYRFQSGSYPLSSSPSLGNFVERIKDACHFLVSAVLGTIISAILTFFFALVGTLLGALTGALIGQETESGFIRGAAIGAISGAVFSIEVFESSLDLWKSDESGFGCFLYLIDVIVSLLSGRLVRERIGPAMLSAVQSQMGAVDTAFDDHTSLFDTGGSKGLTGDLVEKIPKMTITGNNNTDASENTDSCSVCLQDFQLGETVRSLPHCHHMFHLPCIDNWLLRHGSCPMCRRDI

SEQ ID NO: 217 - DNA, 1302 bp, Arabidopsis thaliana
  G409
tgtctctctctctggctctctttctcttaacgtgatcataacgtgattcgaaaattggatatagataggtttcttgttggatcttgatccctctggaaaaggaggggagaatagcagttcatgatgggattttgtatctgcccgttggagtcacctgcgagattactatggagtacaagcttcttccgccataagatcatgatcttctaatccttcctacttcttcccatctttttaatcatcttctcgctatctctgcttcctctttctctctgtttcctctttctcagaactcagaagtagttgttgttttatttctgttgatcaaaaatggaatccaattcgtttttcttcgatccatctgcttcacacggcaacagcatgttcttccttgggaatctcaatcccgtcgtccaaggaggaggagcaagatcgatgatgaacatggaggaaacttcgaagcgaaggcccttctttagctcccctgaggatctctacgacgatgacttttacgacgaccagttgcctgaaaagaagcgtcgcctcactaccgaacaagtgcatctgctggagaaaagcttcgagacagagaacaagctagagcctgaacgcaagactcagcttgccaagaagcttggtctacagccaaggcaagtggctgtctggtttcagaatcgccgagctcgttggaaaacaaaacagcttgagagagactacgatcttctcaagtccacttacgaccaacttctttctaactacgactccatcgtcatggacaacgataagctcagatccgaggttacttccctgaccgaaaagcttcagggcaaacaagagacagctaatgaaccacctggtcaagtgcccgaaccaaaccaacttgatccggtttacattaatgcggcagcaatcaaaaccgaggaccggttaagttcagggagcgttgggagcgcggtactagacgacgacgcacctcaactactagacagctgtgactcttacttcccaagcatcgtacccatccaagacaacagcaacgccagtgatcatgacaatgaccggagctgtttcgccgacgtctttgtgcccaccacttcaccgtcgcacgatcatcacggtgaatcattggctttctggggatggccttagaaaaccactctgataataaatgtgtgtttatttaagttcaagagtcatcttcttgttgtttccatgttgacgataattgttgactcgtggaataattccgctgttcaacggtatttttatcagttgcattatatgcttttatgaaaaaaaaaa

SEQ ID NO: 218 - protein, 272 aa, Arabidopsis thaliana
  G409 Polypeptide (domain in AA coordinates: 64-124)
MESNSFFFDPSASHGNSMFFLGNLNPVVQGGGARSMMNMEETSKRRPFFSSPEDLYDDDFYDDQLPEKKRRLTTEQVHLLEKSFETENKLEPERKTQLAKKLGLQPRQVAVWFQNRRARWKTKQLERDYDLLKSTYDQLLSNYDSIVMDNDKLRSEVTSLTEKLQGKQETANEPPGQVPEPNQLDPVYINAAAIKTEDRLSSGSVGSAVLDDDAPQLLDSCDSYFPSIVPIQDNSNASDHDNDRSCFADVFVPTTSPSHDHHGESLAFWGWP

SEQ ID NO: 219 - DNA, 1240 bp, Arabidopsis thaliana
  G591
gtaaatctctctttgaaggttcctaactcgttaatcgtaactcacagtgactcgttcgagtcaaagtctctgtctttagctcaaaccatggctagtaacaaccctcacgacaacctttctgaccaaactccttctgatgatttcttcgagcaaatcctcggccttcctaacttctcagcctcttctgccgccggtttatctggagttgacggaggattaggtggtggagcaccgcctatgatgctgcagttgggttccggagaagaaggaagtcacatgggtggcttaggaggaagtggaccaactgggtttcacaatcagatgtttcctttggggttaagtcttgatcaagggaaaggacctgggtttcttagacctgaaggaggacatggaagtgggaaaagattctcagatgatgttgttgataatcgatgttcttctatgaaacctgttttccacgggcagcctatgcaacagccacctccatcggccccacatcagcctacttcaatccgtcccagggttcgagctaggcgtggtcaggctactgatccacatagcatcgctgagcggctacgtagagaaagaatagcagaacggatcagggcgctgcaggaacttgtacctactgtgaacaagaccgatagagctgctatgatcgatgagattgtcgattatgtaaagtttctcaggctccaagtcaaggttttgagcatgaaccgacttggtggagccggtgcggttgctccacttgttactgatatgcctctttcatcatcagttgaggatgaaacgggtgagggtggaaggactccgcaaccagcgtgggagaaatggtctaacgatgggactgaacgtcaagtggctaaactgatggaagagaacgttggagccgcgatgcagcttcttcaatcaaaggctctttgtatgatgccaatctcattggcaatggcaatttaccattctcaacctccggatacatcttcagtggtcaagcctgagaacaatcctccacagtaggatttctgcaataaagagtttgtacagctaatccaactgtccaacatgggtttttcttctgctctaatgactctggtttcttctctcctctctcaccgacttgaaaggtaaaaaagtgaaaaaggctttgtagatggaatcaatgtaggatttgcagtagagggcaaaaaaatgtcatatagctcaattgatcaagtcttaaaaaaaaaaaaaaaaaaaa

SEQ ID NO: 220 - protein, 310 aa, Arabidopsis thaliana
  G591 Polypeptide (domain in AA coordinates: 143-240)
MASNNPHDNLSDQTPSDDFFEQILGLPNFSASSAAGLSGVDGGLGGGAPPMMLQLGSGEEGSHMGGLGGSGPTGFHNQMFPLGLSLDQGKGPGFLRPEGGHGSGKRFSDDVVDNRCSSMKPVFHGQPMQQPPPSAPHQPTSIRPRVRARRGQATDPHSIAERLRRERIAERIRALQELVPTVNKTDRAAMIDEIVDYVKFLRLQVKVLSMNRLGGAGAVAPLVTDMPLSSSVEDETGEGGRTPQPAWEKWSNDGTERQVAKLMEENVGAAMQLLQSKALCMMPISLAMAIYHSQPPDTSSVVKPENNPPQ

SEQ ID NO: 221 - DNA, 1431 bp, Arabidopsis thaliana
  G616
ctttaaatcccaaaccaaccctaaagttttgatttttaattttgggggtaaccaaaaaaaaaacaaaaccctaattttttttctttagtgatgagattattggtgatgatgaaatgattggagatctaatgaagaataacaacaatggcgacgttgtggataacgaagtgaacaaccggttaagccggtggcatcacaattcttcccggataattagggtttcacgagcttccggtggtaaagatcgacacagcaaagtcttgacttctaaaggaccacgtgaccgtcgtgtccggttatcagtctccaccgctcttcaattctatgatcttcaagatcggttaggttatgatcaacctagcaaagctgttgaatggttaatcaaagctgctgaagattcaatctctgagcttccttcactcaacaacactcattttccgaccgatgacgagaatcaccagaatcagacattaacaacagttgctgctaattccttgtctaaatctgcttgtagtagcaattcagacacgagcaagaactcttctggtttgtctttatcaagatcggagcttagagataaagctagagagagggctagagagagaacagctaaagagaccaaggaaagagatcataaccacacttcgtttacggatttgttaaattccggttcagatccggttaactcaaaccggcaatggatggcttcagctccttcttcatctccaatggagtatttcagttcgggtttaattctcgggtcgggtcaacaaacccatttccctatttcaacaaattctcatcctttctcatcaatctccgatcatcatcatcatcatcctcatcatcagcatcaagagttttcattcgttcccgaccatttgatatcaccggcagaatccaacggcggagcattcaatcttgattttaatatgtcaacaccctccggcgccggagctgccgtctccgccgcatcaggtggtggcttcagtggtttcaacagggggacccttcagtccaattcaacaaatcagcatcagtcattcctcgctaatctacagaggtttccaacatcagaaagtggaggaggtccacagttcttattcggtgcactgcctgcagagaatcaccaccacaatcaccagtttcagctttactatgaaaatggatgcagaaactcatcagaacataagggtaaaggcaagaactgatgatattaattattgcatctttggttttgttcaaatgctcattttgtatgtttatctttggtttatttcaaaacaaatgttaatctctttcgttgtctgatgtgtgttagggttttgttttatgtattgagggtctttggaaatctttttgcattgtgcttgtaatgttgtatttgtgataatagcattttgtttgtgagttaaaaaaaaaaaaaaaaaa

SEQ ID NO: 222 - protein, 360 aa, Arabidopsis thaliana
  G616 Polypeptide (domain in AA coordinates: 39-95)
MKNNNNGDVVDNEVNNRLSRWHHNSSRIIRVSRASGGKDRHSKVLTSKGPRDRRVRLSVSTALQFYDLQDRLGYDQPSKAVEWLIKAAEDSISELPSLNNTHFPTDDENHQNQTLTTVAANSLSKSACSSNSDTSKNSSGLSLSRSELRDKARERARERTAKETKERDHNHTSFTDLLNSGSDPVNSNRQWMASAPSSSPMEYFSSGLILGSGQQTHFPISTNSHPFSSISDHHHHHPHHQHQEFSFVPDHLISPAESNGGAFNLDFNMSTPSGAGAAVSAASGGGFSGFNRGTLQSNSTNQHQSFLANLQRFPTSESGGGPQFLFGALPAENHHHNHQFQLYYENGCRNSSEHKGKGKN

SEQ ID NO: 223 - DNA, 1571 bp, Arabidopsis thaliana
  G869
aggaacagtgaaaggttcggttttttgggtttcgatctgataatcaacaagaaaaaagggtttgatttatgtcggctgggtttgaatcgactgtgattttgtctttgattcatatctcttctccgatttcatcatcatcttccccatcatcgtcgtctttgaaatcttgtcttctcaacgctcttcacttctgctgtaataagcagaggcttgttctggagactccttctctttccatgcgcttaagacccaaaaggacttgttctagtgttgaagtctttgggggttttcacataaagcagcaaaagttttcttttttcatagttcgctgagagttttgagttttgataccaaaaaagttttgaccttttagagtgattttttgttctttctgttttctgggtatttttgaggagtgggtttaacaatggttgcgattagaaaggaacagtctttgagtggtgttagtagcgagattaagaagagagctaagagaaacactctatcgtcccttcctcaagaaacccaacctttgaggaaagtccgtattattgtgaatgatccttatgctactgatgattcctctagtgatgaggaagagcttaaggttcctaagccaaggaaaatgaaacgtatcgttcgtgagattaactttccttctatggaagtttctgaacagccttctgagagttcttctcaggacagtactaaaactgatggcaagatagctgtgtcagcttctcctgctgttcctaggaagaagcctgttggtgttaggcaaaggaaatgggggaaatgggctgctgagattagagatcctattaagaaaactaggacttggttgggtacttttgatactcttgaagaagctgctaaagcttatgatgctaagaagcttgagtttgatgctattgttgctggaaatgtgtccactactaaacgtgatgtttcttcatctgagactagccaatgctctcgttcttcacctgttgttcctgttgagcaagatgacacttctgcatcagctctcacttgtgtcaacaaccctgatgacgtctcgaccgttgctccaactgctccaactccaaatgttcctgctggtggaaacaaggaaacgttgttcgatttcgactttactaatctacagatccctgattttggtttcttggcagaggagcaacaagacctagacttcgattgtttcctcgcggatgatcagtttgatgatttcggcttgcttgatgacattcaaggattcgaagataacggtccaagtgcgttaccagatttcgactttgcggatgttgaagatcttcagctagctgactctagtttcggtttccttgatcaacttgctcctatcaacatctcttgcccattaaaaagttttgcagcttcataggatcttgcttagtaatgttaagtgagaagagtgttttgttttttcgtttatgctttagtaatttaagacatacaaaagtgtgtgttccggattgtagtaagatcttaagacataaagccgggttttgcaattaggaatcgagttttaatgaagttttagtttatgtttg

SEQ ID NO: 224 - protein, 324 aa, Arabidopsis thaliana
  G869 Polypeptide (domain in AA coordinates: 109-177)
MVAIRKEQSLSGVSSEIKKRAKRNTLSSLPQETQPLRKVRIIVNDPYATDDSSSDEEELKVPKPRKMKRIVREINFPSMEVSEQPSESSSQDSTKTDGKIAVSASPAVPRKKPVGVRQRKWGKWAAEIRDPIKKTRTWLGTFDTLEEAAKAYDAKKLEFDAIVAGNVSTTKRDVSSSETSQCSRSSPVVPVEQDDTSASALTCVNNPDDVSTVAPTAPTPNVPAGGNKETLFDFDFTNLQIPDFGFLAEEQQDLDFDCFLADDQFDDFGLLDDIQGFEDNGPSALPDFDFADVEDLQLADSSFGFLDQLAPINISCPLKSFAAS

SEQ ID NO: 225 - DNA, 1152 bp, Arabidopsis thaliana
  G881
gtgaccgaagaaagcaaattgagactacgcaccaactagtcctttggtttgtatcttaagataaaggtttcttttatggacggttcttcgtttctcgacatctctctcgatctcaacaccaatcctttctccgcaaaacttccgaagaaggaggtctcagttttggcttctactcacttaaagaggaaatggttggagcaagacgagagcgcaagtgagttacgagaggagctaaacagagttaattcagagaacaagaagctaacagagatgttagctagagtctgtgagagctacaacgaactacataatcatttggagaagcttcagagtcgccagagccctgaaatcgagcagaccgatataccgataaagaaaagaaaacaagacccggatgagttcttaggctttcctattggactcagtagtggaaaaactgagaacagctccagcaacgaagatcatcatcatcatcatcagcaacatgagcagaaaaatcagcttctttcatgtaaaagaccagtcactgatagcttcaacaaagcaaaagtttcgactgtctacgtgcctactgaaacatcggacacaagcttgacagttaaagatggatttcaatggaggaaatacggacaaaaggttacaagagacaacccgtcacctagagcttactttagatgctcgtttgcaccgtcttgtccagtaaaaaagaaggtacaacgcagcgcagaggatccatctttacttgtagcgacatacgaagggacgcataaccacttgggtccaaatgcttctgaaggggatgctacaagccagggtgggtcaagcacagtgactttggatctggttaatggctgtcatagactagcgttggagaaaaacgaaagggataatacgatgcaagaggttctgattcaacaaatggcgtcatcgttaacaaaagattcgaaatttacagctgctcttgctgctgctatatctgggaggttaatggagcaatctagaacatgaacgtttttagtgaatgtattgtttttgtttgtttagaatgattcttcgttttcgaattgtgtctttcgattaggagataaaagatgtatataaatattataagtagatgaagaaatcgtataagtaaaaaaaaaaaaaaaaaaa

SEQ ID NO: 226 - protein, 310 aa, Arabidopsis thaliana
  G881 Polypeptide (domain in AA coordinates: 176-233)
MDGSSFLDISLDLNTNPFSAKLPKKEVSVLASTHLKRKWLEQDESASELREELNRVNSENKKLTEMLARVCESYNELHNHLEKLQSRQSPEIEQTDIPIKKRKQDPDEFLGFPIGLSSGKTENSSSNEDHHHHHQQHEQKNQLLSCKRPVTDSFNKAKVSTVYVPTETSDTSLTVKDGFQWRKYGQKVTRDNPSPRAYFRCSFAPSCPVKKKVQRSAEDPSLLVATYEGTHNHLGPNASEGDATSQGGSSTVTLDLVNGCHRLALEKNERDNTMQEVLIQQMASSLTKDSKFTAALAAAISGRLMEQSRT

SEQ ID NO: 227 - DNA, 715 bp, Arabidopsis thaliana
  G1047
caattttaaaccggtcattatgatgtctactgtaccggcctttacctttactgaaccgggtttggttaaccaattatcggatttccagaccggattcactccttgggaattgaactgctccgatctcttctctacaatccatctcgaaccggtcgtaccgagtccttgttctggtgaatccgatgccggttctgtcaaaattaacaccgattttaacggttttgacgaatcgtgtatcggttccatcaaaactaactccggttctgatgattccaaccttttccacggcgtaccgagtcctcaatccgacgaattggactcaaaaaacacgaaaatccgaagtaacgccacgaatcataaccggaacaaattgaaccggtcggttttgcaggtgactgacgaccgtaaacgcaaacggatggaatcaaaccgagaatcagcgaagcggtcgaggatgcgtaaacaaagacacattgataatttaaaagacgaagcaaatcgtctcggtttagaaaaccgggaactcgcaaaccggcttcgaattgttttgtacaacatcgcattaatgtgtacggacaacaatcagcttttgtcggaacaagagattctcagacggagattcttggagatgaggcagattttgattttcagacagcttcagctgaatccatcattgatcatcaatcatcatcatatgatttgaaagaaaaaaaaa

SEQ ID NO: 228 - protein, 227 aa, Arabidopsis thaliana
  G1047 Polypeptide (domain in AA coordinates: 129-180)
MMSTVPAFTFTEPGLVNQLSDFQTGFTPWELNCSDLFSTIHLEPVVPSPCSGESDAGSVKINTDFNGFDESCIGSIKTNSGSDDSNLFHGVPSPQSDELDSKNTKIRSNATNHNRNKLNRSVLQVTDDRKRKRMESNRESAKRSRMRKQRHIDNLKDEANRLGLENRELANRLRIVLYNIALMCTDNNQLLSEQEILRRRFLEMRQILIFRQLQLNPSLIINHHHMI

SEQ ID NO: 229 - DNA, 1011 bp, Arabidopsis thaliana
  G1363
cgtctacctactatggtctggagattagttcgtttattgaactaatgttttagacaatgcaagagttccatagtagcaaagattcattgccttgtcctgcaacttcttgggataactctgtcttcaccaactcaaatgtccaaggatcatcatccttgaccgataacaacactttaagcttgacaatggagatgaaacaaactggttttcaaatgcagcactatgattcctcctctactcaatccactggaggagaatcatatagtgaagttgctagcttaagtgaacctactaatcgttatggccacaacattgttgtcactcatctctcaggttacaaagaaaacccggaaaatcctattggaagtcattcgatatcaaaggtgtctcaagattcagtggttcttcctattgaggcggcttcttggcctttacacggcaatgtaacgccacatttcaatggtttcttgtcttttccttatgcatcacaacacacggtgcagcatcctcaaatcagagggttggttccgtctagaatgcctttgcctcacaacattccagagaacgaaccaattttcgtcaatgcaaaacagtaccaagccattctccgccgcagagagcgccgtgcaaagcttgaagctcagaacaagctcatcaaagtccgcaaaccatatcttcacgagtcgcggcacctccatgcactaaagagagttagaggctctggtggacgtttcctcaacacaaagaagcatcaagaatcaaattcctcactatctcctccattcttgattccacctcatgtcttcaagaactctccaggaaagttccggcaaatggacatttcaaggggtggggttgtgtctagtgtctcgacaacatcttgctcggacataaccgggaacaacaacgacatgttccagcaaaacccacaattcaggttctcaggttatccatcaaaccaccatgtctcagtcctcatgtgagagagctcccgcaagtggtggatgaggc

SEQ ID NO: 230 - protein, 308 aa, Arabidopsis thaliana
  G1363 Polypeptide (domain in AA coordinates: 174-226)
MQEFHSSKDSLPCPATSWDNSVFTNSNVQGSSSLTDNNTLSLTMEMKQTGFQMQHYDSSSTQSTGGESYSEVASLSEPTNRYGHNIVVTHLSGYKENPENPIGSHSISKVSQDSVVLPIEAASWPLHGNVTPHFNGFLSFPYASQHTVQHPQIRGLVPSRMPLPHNIPENEPIFVNAKQYQAILRRRERRAKLEAQNKLIKVRKPYLHESRHLHALKRVRGSGGRFLNTKKHQESNSSLSPPFLIPPHVFKNSPGKFRQMDISRGGVVSSVSTTSCSDITGNNNDMFQQNPQFRFSGYPSNHHVSVLM

SEQ ID NO: 231 - DNA, 914 bp, Arabidopsis thaliana
  G147
aaatcatcagatagaaggaaatattctgattgagagatggctcgtggaaagattcagcttaagaggattgagaacccggttcacagacaagtgactttttgcaagaggagaactggtcttctcaagaaggctaaggagctctctgtgctctgtgatgccgagatcggtgttgtgatcttctctcctcagggcaagctctttgagctcgctactaaaggaacaatggagggaatgattgataagtacatgaagtgtactggtggtggtcgtggttcttcttctgctacttttactgctcaagaacaacttcaaccaccaaatcttgatccgaaagatgagatcaacgtgcttaagcaagagattgagatgcttcagaaagggataagctatatgtttggaggaggagatggggctatgaatcttgaagaacttcttttgcttgagaagcatcttgagtattggatttctcagattcgctctgctaagatggatgttatgcttcaagaaattcagtcattgaggaacaaggaaggagtcctcaaaaacaccaacaagtatctcctcgacaagatagaggaaaacaacaatagcatattagatgctaacttcgcagtcatggagacaaactattcctatccgctaacaatgccaagtgaaatatttcagttctagaccatagggtatttgaagactatgtctcacgaatttaaataaccttggtaagtataatatagtgttgttaaatcacacataattaaaataaagcctgtggaacttcgctaggcagttgaaaatctatccgtatgttttatcctcttgttttacatttgttggtgtgaagatgaaatgactgcaagtgtggtgtgtacttataactctttctactttctatctatgttttgaatttatggatt

SEQ ID NO: 232 - protein, 211 aa, Arabidopsis thaliana
  G147 Polypeptide (domain in AA coordinates: 2-57)
MARGKIQLKRIENPVHRQVTFCKRRTGLLKKAKELSVLCDAEIGVVIFSPQGKLFELATKGTMEGMIDKYMKCTGGGRGSSSATFTAQEQLQPPNLDPKDEINVLKQEIEMLQKGISYMFGGGDGAMNLEELLLLEKHLEYWISQIRSAKMDVMLQEIQSLRNKEGVLKNTNKYLLDKIEENNNSILDANFAVMETNYSYPLTMPSEIFQF

SEQ ID NO: 233 - DNA, 1276 bp, Arabidopsis thaliana
  G896
taatccgattcgtcttcatctgattccctcccttccgagaataataatgtacccgccacctccctcaagcatctacgctcctccgatgctggtgaattgctccggttgccggacgcctctccagctcccatccggcgcccgatctattcgctgcgctctctgccaggctgttactcatatcgccgaccctcgcaccgcccctcctccgcaaccttcctccgccccttctccgcctccccaaatccacgcgcctcccggtcagctgcctcacccccatggcaggaagagggccgtgatctgtggcatctcgtatcgtttctctcgccacgagctcaaaggctgcatcaacgacgccaagtgcatgcgtcaccttctcatcaacaaattcaaattctccccagattcaattctcatgcttaccgaggaagaaactgatccatatcgtatcccgaccaagcaaaacatgaggatggcattgtattggctcgtacagggatgcacagcaggcgactcacttgtcttccactactctggtcatggttcgcgtcaaagaaactacaacggtgatgaagttgatggctatgatgaaacactctgtcctctggattttgaaactcaggggatgattgtagacgatgagatcaacgcaaccattgtacgccctcttccacatggtgtcaagctccattcaattatcgatgcttgccatagtggtaccgttctggatttacccttcctatgcagaatgaacagagctgggcagtatgtgtgggaggatcatcggcctaggtcaggtttgtggaaaggaactgctggtggagaagccatttcaattagtggatgtgatgatgatcagacttcggccgacacatcagcgctgtcgaagatcacgtctacgggtgctatgactttctgttttattcaagcaattgaacgcagcgcacaaggcacaacctatggaagccttctgaattctatgcgcaccacaataaggaatacagggaatgatggtggtggtagtggtggagttgtgacgactgtgctgagcatgcttctgacagggggaagtgcgattgggggattaagacaggagcctcaactgactgcttgccaaacattcgatgtctatgcaaagcctttcactctctagtaaaggacaagtcactttttatgtatagcgagtgtgatttgagaatccgtccatataaccaccttttgtttcttatttttatttttctttcaaaagaataaaggaaaacattgatttggtgattcg

SEQ ID NO: 234 - protein, 367 aa, Arabidopsis thaliana
  G896 Polypeptide (domain in AA coordinates: 18-39)
MYPPPPSSIYAPPMLVNCSGCRTPLQLPSGARSIRCALCQAVTHIADPRTAPPPQPSSAPSPPPQIHAPPGQLPHPHGRKRAVICGISYRFSRHELKGCINDAKCMRHLLINKFKFSPDSILMLTEEETDPYRIPTKQNMRMALYWLVQGCTAGDSLVFHYSGHGSRQRNYNGDEVDGYDETLCPLDFETQGMIVDDEINATIVRPLPHGVKLHSIIDACHSGTVLDLPFLCRMNRAGQYVWEDHRPRSGLWKGTAGGEAISISGCDDDQTSADTSALSKITSTGAMTFCFIQAIERSAQGTTYGSLLNSMRTTIRNTGNDGGGSGGVVTTVLSMLLTGGSAIGGLRQEPQLTACQTFDVYAKPFTL

SEQ ID NO: 235 - DNA, 2545 bp, Arabidopsis thaliana
  G418
acatatgttttaaattctttgtctgaatcttacaggatccgagagagagagctctggaacgatattaacatatatcatgaagaaaaagattgaagtattgatatgggaataactaaaacttctcctaatactacaattctcttgaagacttttcacaataattctatgtcccaagattatcatcatcatcatcatcataatcaacaccaaggaggtatcttcaacttctctaatggattcgaccgatcagattctcccaatttaacaactcagcagaagcaagagcatcaaagggtagagatggacgaggaatcttcagtcgccggaggtaggattccggtctacgaatcagccggtatgttatccgaaatgtttaatttccccggaagcagcggtggaggaagagatctcgacctcggccaatctttccggtcaaataggcagttgcttgaggagcaacatcagaatattccggctatgaatgctacggattcagccaccgccaccgcagccgccatgcagttattcttgatgaatccaccgccaccgcaacaaccaccgtctccgtcatccacaacttccccaaggagccaccacaattcttcaactcttcacatgttacttccaagtccatccaccaacacaactcaccatcagaactacactaatcatatgtctatgcatcagcttccacatcagcatcaccaacagatatcgacgtggcagtcttctcccgatcatcatcatcatcatcacaacagccaaacggagattgggaccgtccacgtggaaaacagcggaggacacggaggacaaggcttgtccttatctctctcatcgtctttagaggctgcagcaaaagcggaagagtatagaaacatttactacggagccaattcttctaacgcatcacctcatcatcaatacaatcaattcaagactcttcttgctaattcttctcaacatcaccatcaagtattaaaccaattccgatcatctccggctgcttcttcctcttccatggcagcggtcaatatcttaagaaactcgaggtacacaacggccgcgcaagagttgttggaagagttttgtagtgttggaagaggatttttgaagaagaacaaacttgggaacagctcaaaccctaatacttgcggtggtgatggtggtggcagctctccttcgtcggccggagcaaacaaggagcatcctcctttatcggcgtctgatcggattgagcatcaaagaaggaaagtgaaactactcaccatgcttgaagaggtggaccgacggtacaaccattactgcgagcaaatgcagatggttgtgaactctttcgacatagtaatgggccacggtgcggcattaccgtacaccgcattggctcaaaaagctatgtcaagacattttagatgccttaaagatgcagttgcggctcagcttaagcagagttgcgaacttcttggggacaaagatgcagcgggaatctcttcttccgggttaacaaaaggtgaaactccgcgtttgcgtttgctagagcaaagtttgcgtcagcaacgtgcgtttcatcaaatgggtatgatggaacaagaagcttggcggccacaacgcggtttgcctgaacgctccgtcaatatacttagagcttggctcttcgaacatttccttcacccgtatccaagtgatgcagataaacacctattggctcgacagactggtttatccagaaatcaggtatcaaattggttcataaatgctagggttcgtttatggaaaccaatggtggaagaaatgtaccaacaagaatcaaaagaaagagaaagagaagaggaattagaagagaacgaagaagatcaagaaacaaaaaacagcaacgacgacaagagcacaaaatccaacaacaatgaaagcaacttcactgccgttcggaccacttcacaaactccaacgacaaccgcaccagacgcatcagacgcagacgcagcagtagcgacaggccaccgtctaagatccaacattaatgcttacgaaaacgacgcttcatcacttctactcccttcctcttattccaacgccgccgctcctgccgctgtttctgacgacttgaattctcgttacggtggctcagacgcgttttccgccgttgccacgtgtcaacaaagtgtaggtgggttcgatgatgctgacatggatggtgttaacgttataaggtttgggacaaaccctactggtgacgtgtctctcacgcttggtttacgccacgctggaaacatgcctgacaaagacgcttctttctgcgttagagagtttgggggtttttagtttgcttttgtcactccatttaattaattaattatagttttccattcttacttattttaattgaaaatctatttttgtctcttaaaagtccaaacaatacattagtctagccctcctctgcttttttttttctatctcgtgaagagaagaaaacgatacgtaaatcccttcgaaaactaatgtacgttgtacgacttattgttttcataaaaaaaaaaaaaaa

SEQ ID NO: 236 - protein, 739 aa, Arabidopsis thaliana
  G418 Polypeptide (domain in AA coordinates: 500-560)
MGITKTSPNTTILLKTFHNNSMSQDYHHHHHHNQHQGGIFNFSNGFDRSDSPNLTTQQKQEHQRVEMDEESSVAGGRIPVYESAGMLSEMFNFPGSSGGGRDLDLGQSFRSNRQLLEEQHQNIPAMNATDSATATAAAMQLFLMNPPPPQQPPSPSSTTSPRSHHNSSTLHMLLPSPSTNTTHHQNYTNHMSMHQLPHQHHQQISTWQSSPDHHHHHHNSQTEIGTVHVENSGGHGGQGLSLSLSSSLEAAAKAEEYRNIYYGANSSNASPHHQYNQFKTLLANSSQHHHQVLNQFRSSPAASSSSMAAVNILRNSRYTTAAQELLEEFCSVGRGFLKKNKLGNSSNPNTCGGDGGGSSPSSAGANKEHPPLSASDRIEHQRRKVKLLTMLEEVDRRYNHYCEQMQMVVNSFDIVMGHGAALPYTALAQKAMSRHFRCLKDAVAAQLKQSCELLGDKDAAGISSSGLTKGETPRLRLLEQSLRQQRAFHQMGMMEQEAWRPQRGLPERSVNILRAWLFEHFLHPYPSDADKHLLARQTGLSRNQVSNWFINARVRLWKPMVEEMYQQESKEREREEELEENEEDQETKNSNDDKSTKSNNNESNFTAVRTTSQTPTTTAPDASDADAAVATGHRLRSNINAYENDASSLLLPSSYSNAAAPAAVSDDLNSRYGGSDAFSAVATCQQSVGGFDDADMDGVNVIRFGTNPTGDVSLTLGLRHAGNMPDKDASFCVREFGGF

SEQ ID NO: 237 - DNA, 1179 bp, Arabidopsis thaliana
  G525
cttctctcttctcaaaaacccttccctcttcgtctccaaacaacaacaaacacaacaacaacaaaaatcttacaagaagatcatttttagaaaccctattaggataaaatggattacgaggcatcaagaatcgtcgaaatggtagaagatgaagaacatatagatctaccaccaggattcagatttcaccctactgatgaagaactcataactcactacctcaaaccaaaggttttcaacactttcttctctgctactgccattggtgaagttgatctcaacaagattgagccttgggacttaccatggaaggctaagatgggagaaaaagaatggtatttcttctgtgtgagagaccggaaatacccgaccggtttaaggacaaaccgggcgacagaagccggttattggaaagccacaggaaaagacaaagagatattcaagggaaaatcacttgtgggtatgaagaaaactttggttttctataaaggaagagctcctaaaggagttaaaaccaattgggttatgcatgaatatcgtttagaaggcaaatattgtattgaaaatcttccccaaacagctaagaacgaatgggttatatgtcgtgttttccaaaaacgtgccgatggtacaaaggttccaatgtcaatgcttgatccacacattaaccgaatggaaccagccggtttaccttcgttaatggattgttctcaacgagactccttcaccggttcgtcgtctcacgtgacctgcttctccgaccaagaaaccgaagacaaaagacttgtccacgagtccaaagacggttttggttctctgttttactcggatcctctgtttttacaagacaattattcgctaatgaagctgttgcttgacggtcaagaaactcaattctccggcaaacctttcgacggtcgtgattcgtccggtacagaagaattggattgcgtttggaatttctgagttgtataagttatgttgtagacttgtagtagtcatgtgttcgtgtgtgtgaatgaatattcttgttacatttttttgtaaaaaaggagaaaaaaatatgctagaaagtcaattgcttttgttatgtagcattagtgttttttatgtactcaatagacttcctaattaaataaaaatcttaatttatttgccaaaaaaaaaaaaaaaaaaaaa

SEQ ID NO: 238 - protein, 285 aa, Arabidopsis thaliana
  G525 Polypeptide (domain in AA coordinates: 23-167)
MDYEASRIVEMVEDEEHIDLPPGFRFHPTDEELITHYLKPKVFNTFFSATAIGEVDLNKIEPWDLPWKAKMGEKEWYFFCVRDRKYPTGLRTNRATEAGYWKATGKDKEIFKGKSLVGMKKTLVFYKGRAPKGVKTNWVMHEYRLEGKYCIENLPQTAKNEWVICRVFQKRADGTKVPMSMLDPHINRMEPAGLPSLMDCSQRDSFTGSSSHVTCFSDQETEDKRLVHESKDGFGSLFYSDPLFLQDNYSLMKLLLDGQETQFSGKPFDGRDSSGTEELDCVWNF

SEQ ID NO: 239 - DNA, 1695 bp, Arabidopsis thaliana
  G1927
atggttgattcttctcgtgattcgtgtttcaaagctggtaagtttagtgctccaggttttcgatttcaccctactgatgaagagcttgtggtttattatcttaagaggaagatctgttgtaaaaaacttcgagtcaatgccattggtgtcgttgatgtttacaaagtcgatccttctgaattgcctggtctatcgatgttgaagacgggagatagacagtggttctttttcactccaaggaataggaagtatcctaacgcagctaggtcaagtagaggtactgcaactggttattggaaggcgacaggaaaggatcgagtcattgagtacaattcaagatctgttggactcaagaagactcttgttttctatagaggtcgtgctcctaatggtgagagaactgactgggtgatgcatgagtacactatggatgaagaagagctagggagatgtaagaacgctaaggagtattatgctctttataagctttataagaagagtggggctggtcctaagaatggtgaacagtatggtgctccgttccaagaagaagaatgggttgatagtgatagtgaagatgcagatagtgtcgctgtaccggattatcccgtggtccgttatgagaatggtccttgtgtggatgatactaaattttgcaatcctgtcaaacttcagttagaggatattgagaagcttctcaatgaaatcccagatgcacccggggttaaccaaagacagtttgatgagtttgttggtgttccacagggtaatagtgcagaagtgatacagagcacattgctgaataattcttctggagagtatattgaccctcggacgaatggaatgttcttgccaaatggccagctatacaacagggactcgagttttcagtcccatttgaattcatttgaggctacctctggtatggcacctcttctagataatgagaaggaggagtacattgaaatgaatgatcttctgatccctgagctcggtgcttcttcaacagagaaatccacagagttcttgaaccatggtgaatttggtgatgttaatgaatacgaccaattgttcaatgacatatctgtttttcagggaacttctacagatctgtcttgtctgagtaattttactaataacacatcaggccaaagacagcaattactttatgaacagttccagtaccagacacctgagaaccagcttaataactacatgcatcctagtaccactcttaatcagttcactgacaatatgtggtttaaagatgatcaggctgctctctatgttcaaccaccacaatcttcttctggagcattcacttcacagtcaacaggtgtgatgcctgagtctatgaatcccactatgagtgtaaatccccaatacaaggaaggacaaaatggtggtggaacaaggagccagttctcatcagctctgtgggaattattggaatcaataccatcaacaccagcctctgcctgtgagggtcctcttaaccagacctttgtgcgtatgtctagcttcagccgcatcaggttcaatggaacgtcagtgactagtagaaaagtcactgtagcaaagaagcgtatcagtaacagaggttttcttctgttatcaattatgggtgctttgtgtgctatcttctgggtgttcaaagccaccgttggagttatgggaagacctctcttgtcgtga

SEQ ID NO: 240 - protein, 564 aa, Arabidopsis thaliana
  G1927 Polypeptide (conserved domain in AA coordinates:17-188)
MVDSSRDSCFKAGKFSAPGFRFHPTDEELVVYYLKRKICCKKLRVNAIGVVDVYKVDPSELPGLSMLKTGDRQWFFFTPRNRKYPNAARSSRGTATGYWKATGKDRVIEYNSRSVGLKKTLVFYRGRAPNGERTDWVMHEYTMDEEELGRCKNAKEYYALYKLYKKSGAGPKNGEQYGAPFQEEEWVDSDSEDADSVAVPDYPVVRYENGPCVDDTKFCNPVKLQLEDIEKLLNEIPDAPGVNQRQFDEFVGVPQGNSAEVIQSTLLNNSSGEYIDPRTNGMFLPNGQLYNRDSSFQSHLNSFEATSGMAPLLDNEKEEYIEMNDLLIPELGASSTEKSTEFLNHGEFGDVNEYDQLFNDISVFQGTSTDLSCLSNFTNNTSGQRQQLLYEQFQYQTPENQLNNYMHPSTTLNQFTDNMWFKDDQAALYVQPPQSSSGAFTSQSTGVMPESMNPTMSVNPQYKEGQNGGGTRSQFSSALWELLESIPSTPASACEGPLNQTFVRMSSFSRIRFNGTSVTSRKVTVAKKRISNRGFLLLSIMGALCAIFWVFKATVGVMGRPLLS

SEQ ID NO: 241 - DNA, 2104 bp, Arabidopsis thaliana
  G278
tcgatctttaaccaaatccagttgataaggtctcttcgttgattagcagagatctctttaatttgtgaatttcaattcatcggaacctgttgatggacaccaccattgatggattcgccgattcttatgaaatcagcagcactagtttcgtcgctaccgataacaccgactcctctattgtttatctggccgccgaacaagtactcaccggacctgatgtatctgctctgcaattgctctccaacagcttcgaatccgtctttgactcgccggatgatttctacagcgacgctaagcttgttctctccgacggccgggaagtttctttccaccggtgcgttttgtcagcgagaagctctttcttcaagagcgctttagccgccgctaagaaggagaaagactccaacaacaccgccgccgtgaagctcgagcttaaggagattgccaaggattacgaagtcggtttcgattcggttgtgactgttttggcttatgtttacagcagcagagtgagaccgccgcctaaaggagtttctgaatgcgcagacgagaattgctgccacgtggcttgccggccggcggtggatttcatgttggaggttctctatttggctttcatcttcaagatccctgaattaattactctctatcagaggcacttattggacgttgtagacaaagttgttatagaggacacattggttatactcaagcttgctaatatatgtggtaaagcttgtatgaagctattggatagatgtaaagagattattgtcaagtctaatgtagatatggttagtcttgaaaagtcattgccggaagagcttgttaaagagataattgatagacgtaaagagcttggtttggaggtacctaaagtaaagaaacatgtctcgaatgtacataaggcacttgactcggatgatattgagttagtcaagttgcttttgaaagaggatcacaccaatctagatgatgcgtgtgctcttcatttcgctgttgcatattgcaatgtgaagaccgcaacagatcttttaaaacttgatcttgccgatgtcaaccataggaatccgaggggatatacggtgcttcatgttgctgcgatgcggaaggagccacaattgatactatctctattggaaaaaggtgcaagtgcatcagaagcaactttggaaggtagaaccgcactcatgatcgcaaaacaagccactatggcggttgaatgtaataatatcccggagcaatgcaagcattctctcaaaggccgactatgtgtagaaatactagagcaagaagacaaacgagaacaaattcctagagatgttcctccctcttttgcagtggcggccgatgaattgaagatgacgctgctcgatcttgaaaatagagttgcacttgctcaacgtctttttccaacggaagcacaagctgcaatggagatcgccgaaatgaagggaacatgtgagttcatagtgactagcctcgagcctgaccgtctcactggtacgaagagaacatcaccgggtgtaaagatagcacctttcagaatcctagaagagcatcaaagtagactaaaagcgctttctaaaaccgtggaactcgggaaacgattcttcccgcgctgttcggcagtgctcgaccagattatgaactgtgaggacttgactcaactggcttgcggagaagacgacactgctgagaaacgactacaaaagaagcaaaggtacatggaaatacaagagacactaaagaaggcctttagtgaggacaatttggaattaggaaattcgtccctgacagattcgacttcttccacatcgaaatcaaccggtggaaagaggtctaaccgtaaactctctcatcgtcgtcggtgagactcttgcctcttagtgtaatttttgctgtaccatataattctgttttcatgatgactgtaactgtttatgtctatcgttggcgtcatatagtttcgctcttcgttttgcatcctgtgtattattgctgcaggtgtgcttcaaacaaatgttgtaacaatttgaaccaatggtatacagatttgtaatatatatttatgtacatcaacaataaaaaaaaaaaaaaaaaa

SEQ ID NO: 242 - protein, 593 aa, Arabidopsis thaliana
  G278 Polypeptide (domain in AA coordinates: 2-593)
MDTTIDGFADSYEISSTSFVATDNTDSSIVYLAAEQVLTGPDVSALQLLSNSFESVFDSPDDFYSDAKLVLSDGREVSFHRCVLSARSSFFKSALAAAKKEKDSNNTAAVKLELKEIAKDYEVGFDSVVTVLAYVYSSRVRPPPKGVSECADENCCHVACRPAVDFMLEVLYLAFIFKIPELITLYQRHLLDVVDKVVIEDTLVILKLANICGKACMKLLDRCKEIIVKSNVDMVSLEKSLPEELVKEIIDRRKELGLEVPKVKKHVSNVHKALDSDDIELVKLLLKEDHTNLDDACALHFAVAYCNVKTATDLLKLDLADVNHRNPRGYTVLHVAAMRKEPQLILSLLEKGASASEATLEGRTALMIAKQATMAVECNNIPEQCKHSLKGRLCVEILEQEDKREQIPRDVPPSFAVAADELKMTLLDLENRVALAQRLFPTEAQAAMEIAEMKGTCEFIVTSLEPDRLTGTKRTSPGVKIAPFRILEEHQSRLKALSKTVELGKRFFPRCSAVLDQIMNCEDLTQLACGEDDTAEKRLQKKQRYMEIQETLKKAFSEDNLELGNSSLTDSTSSTSKSTGGKRSNRKLSHRRR

SEQ ID NO: 243 - DNA, 1292 bp, Arabidopsis thaliana
  G594
agaaaagataagagccttttaaagttttttttttaccttctcttcatggacttgtctgtacttgataggcttaagtggctgcaacagcaacaaatggtttcacctgagtttcttcagatacttggctcagatgggagagaagagctcaaaagagttgagagttacttgggaaacaacaatgatgagctgcagagtttcagacattttcccgaattcggaccggattatgatactactgatggctgcatttctaggacaagtagcttccatatggagccagtgaagaataatggacacagcagagccattaccttgcagaacaagagaaaaccagagggtaagacagaaaagagagagaagaagaagatcaaagcagaggatgaaacagagccaagcatgaaagggaaatcaaacatgagtaacacagagacatcttcagaaattcagaaaccagattacattcatgttagggctagacgaggtgaagccaccgacagacatagcttagcagagagggcaagaagagaaaagataagcaagaagatgaaatgtctacaagatattgttcctggatgcaacaaagttactggaaaagctggtatgcttgatgagatcatcaactatgtccaatctctgcaacaacaagtcgagttcttgtcgatgaaactctctgtcataaatccagaacttgagtgtcatatcgatgatttatccgcaaaacagtttcaggcttacttcacaggtcctccagaaggtgactcgaagcagtcaatcatggcggattttcggtcttttccattacatcagcaaggatctttagattactcagtcataaactcagaccacaccacatctctcggcgctaaagatcatacatcatcaagctgggaaactcactcacagtgtctttacaacagcttgagaaccgattctgtttccaatttcttcagcctcaagtaaaaaaattagggatagcctcattaaaaaaatcgcggttttttgttgttgtcttatccatttatctatcttatctgaaatttgaaccagaaagacagaggaaaccaatccaaagatctttctcaatctattatcttcatacaaatatagtgatttacatatattccaggggatatgtatatgtgtagaagaaagagaaaaaactcttgtggtcatagcaattcctttttttgtacattgtagaatcaaactcttgtggtcgtaacaattatttccttcacaaattacaactacacttgtattaatggagatgccttttggccctgggatcaaca

SEQ ID NO: 244 - protein, 304 aa, Arabidopsis thaliana
  G594 Polypeptide (domain in AA coordinates: 140-204)
MDLSVLDRLKWLQQQQMVSPEFLQILGSDGREELKRVESYLGNNNDELQSFRHFPEFGPDYDTTDGCISRTSSFHMEPVKNNGHSRAITLQNKRKPEGKTEKREKKKIKAEDETEPSMKGKSNMSNTETSSEIQKPDYIHVRARRGEATDRHSLAERARREKISKKMKCLQDIVPGCNKVTGKAGMLDEIINYVQSLQQQVEFLSMKLSVINPELECHIDDLSAKQFQAYFTGPPEGDSKQSIMADFRSFPLHQQGSLDYSVINSDHTTSLGAKDHTSSSWETHSQCLYNSLRTDSVSNFFSLK

SEQ ID NO: 245 - DNA, 1231 bp, Arabidopsis thaliana
  G805
tatagagagaggaaaaaactatggctcacataaagatctaacagagacagtagtatagtcccacttcccccccaccaaagcttcgatcatcatcatcatcatcatcatggatccggatccggatcataaccatcgacccaacttccctctccagcttcttgattcttctacctcctcctcttccacttccttagccatcatctctactacttccgaacctaactccgaacctaagaagcctcctcctaaacgaacctctactaaagaccgacacaccaaagtcgaaggccgaggccgtcggatccgtatgcctgccatgtgtgctgcacgtgtctttcagctcacacgtgagcttggtcacaaatccgacggtgaaactattgagtggctactccaacaagcagaaccagcggttatagccgctacagggactggaaccattccggctaacttcacttctttaaacatctcacttcgtagctcaagatcttctctctctgctgctcatcttcgtacaactcctagtagctattactttcattcaccacatcagtccatgactcatcatcttcaacatcagcatcaggttcgtcccaagaacgagtcacattcttcgtcttcttcttcttcacagcttttagatcacaaccaaatgggtaactatctagtacaatcaactgctggatctttacctacgagtcagagtcctgcaacggcaccgttttggagtagtggtgacaacacacagaatctttgggcttttaatattaatcctcatcattccggtgttgtcgccggagatgtttacaaccccaacagtggtggtagtggcggcggtagtggagttcatttgatgaattttgcagctcctattgctttgttttctggacagcctttggcttctggttatggaggaggaggaggtggcggtggagaacatagccattatggagttttagcggcgttgaatgctgcttaccgaccggtggcggagacggggaaccataacaacaaccagcaaaaccgtgacggagatcatcatcacaaccatcaagaagatggaagcaccagtcatcattcctaggcaaacatacacaaacaaatatattctgtgagatttatttttctttttttgtcctttcgtttgtttgtttgttcttaacaagcgtgttttttttgcattgcttctttttcatatatttttatttatttctaaattctaataaaaaaa

SEQ ID NO: 246 - protein, 325 aa, Arabidopsis thaliana
  G805 Polypeptide (domain in AA coordinates: 51-114)
MDPDPDHNHRPNFPLQLLDSSTSSSSTSLAIISTTSEPNSEPKKPPPKRTSTKDRHTKVEGRGRRIRMPAMCAARVFQLTRELGHKSDGETIEWLLQQAEPAVIAATGTGTIPANFTSLNISLRSSRSSLSAAHLRTTPSSYYFHSPHQSMTHHLQHQHQVRPKNESHSSSSSSSQLLDHNQMGNYLVQSTAGSLPTSQSPATAPFWSSGDNTQNLWAFNINPHHSGVVAGDVYNPNSGGSGGGSGVHLMNFAAPIALFSGQPLASGYGGGGGGGGEHSHYGVLAALNAAYRPVAETGNHNNNQQNRDGDHHHNHQEDGSTSHHS

SEQ ID NO: 247 - DNA, 869 bp, Glycine max
  G3456
tcgacaacttcaacttttgttatggccaaccggtggtggaccgggtcggtgggtctagagaactctggccactcgatgaaaaaaccggatctggggttttccatgaacgagagtacggtgacggggaaccatataggagaagaagatgaggacagagaaaacagcgacgagccaagagagggagctattgacgtcgccaccacgcgccgccctaggggacgtccaccgggctccagaaacaagccgaaaccgccgatattcgtcacccgagacagccctaacgcgctgcggagccacgtcatggagattgccgtcggagccgacatcgccgactgcgtggcgcagttcgctcggaggcgccagcgcggggtttccattctcagcggcagcgggaccgtcgtcaacgtcaatctccggcaacccacggcacccggcgccgtcatggcgctccacggccgcttcgacatcctctccctcaccggctcctttctccctgggccgtcccctcccggcgccaccgggctcacaatctacctcgccggaggccaggggcagatcgtcggcggcggagtggtgggcccgctcgtggcggcgggccccgtattggtaatggcggctactttttccaatgctacgtatgaaagattgcctttagaggatgatgatcaggaacaacacggcggcggaggcggaggaggttcgccgcaggaaaaaaccgggggtcccggcgaggcgtcgtcgtcgatttcggtttataacaataatgttcctccgagtttaggtcttccgaatgggcaacatctgaaccatgaagcttattcttctccttggggtcattctcctcatgccagacctcctttctaattagc

SEQ ID NO: 248 - protein, 262 aa, Glycine max
  G3456 Polypeptide (domains in AA coordinates: 44-52, 118-162, DUF296:71-188)
MKKPDLGFSMNESTVTGNHIGEEDEDRENSDEPREGAIDVATTRRPRGRPPGSRNKPKPPIFVTRDSPNALRSHVMEIAVGADIADCVAQFARRRQRGVSILSGSGTVVNVNLRQPTAPGAVMALHGRFDILSLTGSFLPGPSPPGATGLTIYLAGGQGQIVGGGVVGPLVAAGPVLVMAATFSNATYERLPLEDDDQEQHGGGGGGGSPQEKTGGPGEASSSISVYNNNVPPSLGLPNGQHLNHEAYSSPWGHSPHARPPF

SEQ ID NO: 249 - DNA, 1003 bp, Oryza sativa
  G3401
ggatatataggccgcaggtagaagctggcgagccggtggtgggacgaggggcggctcagcctgccggtgacagccgccgacccatccctcggccttggcaacaacgacaccaccggcgccggtgacgacgacatggcgtccaaggagccaagcggcgaccacgaccacgagatgaacgggaccagcgccgggggcggcgagcccaaggacggcgcggtggtgaccggccgcaaccggcgcccccgcggacggccgccgggctccaagaacaagcccaagccgcccatcttcgtgacgcgggacagcccgaacgcgctgcgcagccacgtcatggaggtggccggcggcgccgatgtcgccgagtccatcgcgcacttcgcgcggcggcggcagcgcggcgtctgcgtgctcagcggggccggcaccgtgaccgacgtggccctgcgccagccggccgcgccgagcgccgtggtggcgctccgtgggcggttcgagatcctgtccctgacggggacgttcctgccggggccggcgccgccgggctccaccgggctgaccgtgtacctcgccggcgggcaggggcaggtggtgggcggcagcgtggtggggacgctcaccgcggcggggccggtcatggtgatcgcctccaccttcgccaacgccacctacgagaggctgccgctggatcaggaggaggaggaagcagcggcaggcggcatgatggcgccgccgccactcatggccggcgccgccgatccactacttttcggcgggggaatgcacgacgccgggcttgctgcatggcaccatgcccgccctccgccgccgccgccctactagctctctagctagattaattaattaagcttcatgaattaaatccttgcttaattaattggcatatatatatactcacatgatatatatgatcaacaagctatatatagctagccagctcgagctaattaattaacaaaaggtgagccaatataatgcaagatcg

SEQ ID NO: 250 - protein, 235 aa, Oryza sativa
  G3401 Polypeptide (domains in AA coordinates: 35-43, 109-153, DUF296:62-179)
MASKEPSGDHDHEMNGTSAGGGEPKDGAVVTGRNRRPRGRPPGSKNKPKPPIFVTRDSPNALRSHVMEVAGGADVAESIAHFARRRQRGVCVLSGAGTVTDVALRQPAAPSAVVALRGRFEILSLTGTFLPGPAPPGSTGLTVYLAGGQGQVVGGSVVGTLTAAGPVMVIASTFANATYERLPLDQEEEEAAAGGMMAPPPLMAGAADPLLFGGGMHDAGLAAWHHARPPPPPPY

SEQ ID NO: 251 - DNA, 1160 bp, Oryza sativa
  G3399
cggtgaggagcgagttgtagaggaggaggggcaccgatcaaccgggaagctggcggccgggaagtggtgggagcggccagatgacacggccatggccgggatggaccctggcgggggcggcgccggcgccggcagctcacggtacttccaccatctgctccgaccgcagcagccgtcgccgctgtcaccgctgtcgccgacatcccatgtcaagatggagcactccaagatgtcacccgacaagagccccgtgggcgagggagatcacgcgggagggagtggaagcggcggcgtcggcggtgaccaccagccgtcgtcgtcggccatggtgcccgtcgagggtggcagcggcagcgccggcggtagtggctcgggtgggccgacgcggcgcccgcgcgggcgcccgcccgggtccaagaacaagccgaagccgcccatcatcgtgacgcgcgacagcccgaacgcgctgcactcgcacgtgctcgaggtcgccggcggcgccgacgtcgtcgactgcgtggccgagtacgcccgccgccgagggcgcggcgtgtgcgtgctgagcggcggcggcgccgtcgtcaacgtggcgctgcggcagccgggcgcgtcgccgccgggcagcatggtggccacgctgcggggccggttcgagatcctatctctcacgggcacggtcctgccgcctcccgcgccacccggcgcgagcggcctcaccgtgttcctctccggcggccagggccaggtgatcggcggcagcgtggtgggcccgctggtcgccgcggggcccgtcgtcctgatggcggcctcattcgcgaacgccgtgtacgagcggctgccgctggagggcgaggaagaggaggtcgccgcgcccgccgccggaggcgaagcacaagatcaagtggcacaatcagctggacccccagggcagcaaccggcggcgtcacagtcctccggcgtgacaggaggcgacggcaccggcggcgccggtggcatgtcgctctacaacctcgccgggaatgtgggaggctatcagctccccggagacaacttcggaggttggagcggcgccggcgccggcggagtcaggccaccgttctgacccatgtcttagcatccagttcaaaaattctccaaattaagaattgcgcagtgcaggc

SEQ ID NO: 252 - protein, 336 aa, Oryza sativa
  G3399 Polypeptide (domain in AA coordinates: 99-107, 176-220, DUF296:126-246)
MAGMDPGGGGAGAGSSRYFHHLLRPQQPSPLSPLSPTSHVKMEHSKMSPDKSPVGEGDHAGGSGSGGVGGDHQPSSSAMVPVEGGSGSAGGSGSGGPTRRPRGRPPGSKNKPKPPIIVTRDSPNALHSHVLEVAGGADVVDCVAEYARRRGRGVCVLSGGGAVVNVALRQPGASPPGSMVATLRGRFEILSLTGTVLPPPAPPGASGLTVFLSGGQGQVIGGSVVGPLVAAGPVVLMAASFANAVYERLPLEGEEEEVAAPAAGGEAQDQVAQSAGPPGQQPAASQSSGVTGGDGTGGAGGMSLYNLAGNVGGYQLPGDNFGGWSGAGAGGVRPPF

SEQ ID NO: 253 - DNA, 918 bp, Oryza sativa
  G3406
atggcaggtctcgacctcggcaccgccgcgacgcgctacgtccaccagctccaccacctccaccccgacctccagctgcagcacagctacgccaagcagcacgagccgtccgacgacgaccccaacggcagcggcggcggcggcaacagcaacggcgggccgtacggggaccatgacggcgggtcctcgtcgtcaggtcctgccaccgacggcgcggtcggcgggcccggcgacgtggtggcgcgccggccgcgggggcgcccgcctggctccaagaacaagccgaagccgccggtgatcatcacgcgggagagcgccaacacgctgcgcgcccacatcctggaggtcgggagcggctgcgacgtgttcgagtgcgtctccacgtacgcgcgccggcggcagcgcggcgtgtgcgtgctgagcggcagcggcgtggtcaccaacgtgacgctgcgtcagccgtcggcgcccgcgggcgccgtcgtgtcgctgcacgggaggttcgagatcctgtcgctctcgggctccttcctcccgccgccggctccccccggcgccaccagcctcaccatcttcctcgccgggggccagggacaggtcgtcggcggcaacgtcgtcggcgcgctctacgccgcgggcccggtcatcgtcatcgcggcgtccttcgccaacgtcgcctacgagcgcctcccactggaggaggaggaggcgccgccgccgcaggccggcctgcagatgcagcagcccggcggcggcgccgatgctggtggcatgggtggcgcgttcccgccggacccgtctgccgccggcctcccgttcttcaacctgccgctcaacaacatgcccggtggcggcggctcacagctccctcccggcgccgacggccatggctgggccggcgcacggccaccgttctga

SEQ ID NO: 254 - protein, 305 aa, Oryza sativa
  G3406 Polypeptide (domain in AA coordinates: 82-90, 157-201, DUF296:109-227)
MAGLDLGTAATRYVHQLHHLHPDLQLQHSYAKQHEPSDDDPNGSGGGGNSNGGPYGDHDGGSSSSGPATDGAVGGPGDVVARRPRGRPPGSKNKPKPPVIITRESANTLRAHILEVGSGCDVFECVSTYARRRQRGVCVLSGSGVVTNVTLRQPSAPAGAVVSLHGRFEILSLSGSFLPPPAPPGATSLTIFLAGGQGQVVGGNVVGALYAAGPVIVIAASFANVAYERLPLEEEEAPPPQAGLQMQQPGGGADAGGMGGAFPPDPSAAGLPFFNLPLNNMPGGGGSQLPPGADGHGWAGARPPF

SEQ ID NO: 255 - DNA, 1473 bp, Arabidopsis thaliana
  G1067
tctcaagcttctctctcctttttttcccatagcacatcagaatcgctaaatacgactcctatgcaaagaagaagctacttctttctcttgccctaattaatctacctaactagggtttcctcttacctttcatgagagagatcatttaacataagtcaccttttttatatcttttgcttcgtctttaatttagttctgttcttggtctgtttctatattttgtcggcttgcgtaaccgatcacaccttaatgctttagctattgtttcctcaaaatcatgagttttgacttctcgatctgagttttctttttctctctttacgctcttcttcacctagctaccaatatatgaacgagcaggatcaagaatcgagaaattgatttgagctggcgaataagcagtggtgggatagggaattagtagatgcggcggcgatggaaggcggttacgagcaaggcggtggagcttctagatacttccataacctctttagaccggagattcaccaccaacagcttcaaccgcagggcgggatcaatcttatcgaccagcatcatcatcagcaccagcaacatcaacaacaacaacaaccgtcggatgattcaagagaatctgaccattcaaacaaagatcatcatcaacagggtcgacccgattcagacccgaatacatcaagctcagcaccgggaaaacgtccacgtggacgtccaccaggatctaagaacaaagccaagccaccgatcatagtaactcgtgatagccccaacgcgcttagatctcacgttcttgaagtatctcctggagctgacatagttgagagtgtttccacgtacgctaggaggagagggagaggcgtctccgttttaggaggaaacggcaccgtatctaacgtcactctccgtcagccagtcactcctggaaatggcggtggtgtgtccggaggaggaggagttgtgactttacatggaaggtttgagattctttcgctaacggggactgttttgccacctcctgcaccgcctggtgccggtggtttgtctatatttttagccggagggcaaggtcaggtggtcggaggaagcgttgtggctccccttattgcatcagctccggttatactaatggcggcttcgttctcaaatgcggttttcgagagactaccgattgaggaggaggaagaagaaggtggtggtggcggaggaggaggaggaggagggccaccgcagatgcaacaagctccatcagcatctccgccgtctggagtgaccggtcagggacagttaggaggtaatgtgggtggttatgggttttctggtgatcctcatttgcttggatggggagctggaacaccttcaagaccacctttttaattgaattttaatgtccggaaatttatgtgtttttatcatcttgaggagtcgtctttcctttgggatatttggtgtttaatgtttagttgatatgcatatttt

SEQ ID NO: 256 - protein, 311 aa, Arabidopsis thaliana
  G1067 Polypeptide (domain in AA coordinates: 86-94, 169-213, DUF296:113-239)
MEGGYEQGGGASRYFHNLFRPEIHHQQLQPQGGINLIDQHHHQHQQHQQQQQPSDDSRESDHSNKDHHQQGRPDSDPNTSSSAPGKRPRGRPPGSKNKAKPPIIVTRDSPNALRSHVLEVSPGADIVESVSTYARRRGRGVSVLGGNGTVSNVTLRQPVTPGNGGGVSGGGGVVTLHGRFEILSLTGTVLPPPAPPGAGGLSIFLAGGQGQVVGGSVVAPLIASAPVILMAASFSNAVFERLPIEEEEEEGGGGGGGGGGGPPQMQQAPSASPPSGVTGQGQLGGNVGGYGFSGDPHLLGWGAGTPSRPPF

SEQ ID NO: 257 - DNA, 1394 bp, Arabidopsis thaliana
  G596
taatttctctacttcagatttttttctccttagattaatttaattgagttattgtacatccctcaagctaagattctggttttgtgagttgagtggatgagaagaggagagattaactaaattagggtttcaattgtttactttttgtttgctttttatatcaagtaatggatcaggtctctcgctctcttcctccaccttttctctcaagagatctccatcttcacccacaccatcaattccagcatcagcagcagcagcagcaacagaatcacggccacgatatagaccagcaccgaatcggtgggctaaaacgtgaccgagatgctgatatcgatcccaacgagcactcttcagccggaaaagatcaaagtactcctggctccggtggagaaagcggcggcggaggaggaggagataatcacatcacgagaaggccacgtggcagaccagcgggatctaagaacaaaccaaaaccgccaatcatcatcactcgagacagcgcaaacgctctcaaatctcatgtcatggaagtagcaaacggatgtgacgtcatggaaagtgtcaccgtcttcgctcgccgtcgccaacgtggcatctgcgttttgagcggaaacggcgccgttaccaacgttaccataagacaaccagcttcagtacctggtggtggctcatctgtcgttaacttacacggacgtttcgagattctttctctctcgggatcattccttcctcctccggctccaccagctgcgtcaggtctaacgatttacttagccggtggtcagggacaggttgttggaggaagcgtggttggtccactcatggcttcaggacctgtagtgattatggcagcttcgtttggaaacgctgcgtatgagagactgccgttggaggaagacgatcaagaagagcaaacagctggagcggttgctaataatatcgatggaaacgcaacaatgggtggtggaacgcaaacgcaaactcagacgcagcagcaacagcaacaacagttgatgcaagatccgacgtcgtttatacaagggttgcctccgaatcttatgaattctgttcaattgccagctgaagcttattggggaactccgagaccatctttctaaatcgcgaagaaaaaacaagttagatacgttcgttgtttttaatttataatctctcttctgtcaagttttaattttctttttcttcttctttgttttctaaagataattgtagtctttgacgaagattcgtggtacgtatgaatcgaagagaatcgttttggtcatgggattgctcgatctattaggtttgagagggggtttgtgttttgcgttgactagcagattataaaattgttgattttcgagtttttattttcatgtgttggtgataaa

SEQ ID NO: 258 - protein, 317 aa, Arabidopsis thaliana
  G596 Polypeptide (domains in AA coordinates: 89-97, 167-211, DUF296:116-237)
MDQVSRSLPPPFLSRDLHLHPHHQFQHQQQQQQQNHGHDIDQHRIGGLKRDRDADIDPNEHSSAGKDQSTPGSGGESGGGGGGDNHITRRPRGRPAGSKNKPKPPIIITRDSANALKSHVMEVANGCDVMESVTVFARRRQRGICVLSGNGAVTNVTIRQPASVPGGGSSVVNLHGRFEILSLSGSFLPPPAPPAASGLTIYLAGGQGQVVGGSVVGPLMASGPVVIMAASFGNAAYERLPLEEDDQEEQTAGAVANNIDGNATMGGGTQTQTQTQQQQQQQLMQDPTSFIQGLPPNLMNSVQLPAEAYWGTPRPSF

SEQ ID NO: 259 - DNA, 1283 bp, Glycine max
  G3457
atcatcaccaaatggtgctttgttcagctcaaattttggtggggttttgcaaaaaaccttaattcccttttctctttttccttttatgttgaagataactactaagtagcatgctcccaacacctcaaagtaaccaaaccaaaatcatcaccaccatctagatcccatattcccatctattaccctttcaatttgcttggacttttgtaggtgttcattgttcaaggcctccaaatctagggttgtgataaatggatcctgtagcagcacaaggacgtcctctccctccaccttttctcactagagatcttcacttacaccctcaccaccaattccagccccaccacaaccaccaaaacaccgaggatgaagccggcaatggccgcggccagaagcgagatcgcgacgagaacgccggcggcggaggcggggccaccacgcccccccagggcggcggggaaggcaaggaatccgggtcaggagatggaggagggagtgacatggggagaagaccaagaggaagacccgcagggtccaaaaacaagcccaaaccacccattatcatcacaagagacagtgccaacgctctccgatcccatgtcatggaaatcgccaacggctgcgacatcatggagagcatcaccgcctttgcaaggcggcgacagcgcggtgtctgcgtgctcagcggcagcggcactgtcaccaacgtcacgctccggcagccggcctcgccgggagcagttgtgacccttcatggaagatttgagattttgtccctgtccggttcttttctgccgccgccggccccacctgcggcgtcaggactagccatatatctggctggcggacagggacaggtagtaggtggaagtgtggtgggaccccttgtggcctcaggtcccgttgtcatcatggctgcttcatttggtaatgctgcttatgagagactgcccttagaggaagaggaaactccggtggcagttgctggcaacggaggattaggatccccaggaatcccaggaacccagcaacaaccgcaacagcaacagcaacaacaacttgtgggagatcctaatagttcttctcttttccatggaatgcctcagaatcttctcaattcagttcaattaccggctgagggttattggggtggaagtgctcgccctcccttttaacaaagtgttttactttcatggttttttccgttatctttgttttcttctttttcttattttatttttgtttatgtctctttttttttttttaatttcgactttctcttt

SEQ ID NO: 260 - protein, 307 aa, Glycine max
  G3457 Polypeptide (domain in AA coordinates: 86-94, 160-204, DUF296:113-230)
MDPVAAQGRPLPPPFLTRDLHLHPHHQFQPHHNHQNTEDEAGNGRGQKRDRDENAGGGGGATTPPQGGGEGKESGSGDGGGSDMGRRPRGRPAGSKNKPKPPIIITRDSANALRSHVMEIANGCDIMESITAFARRRQRGVCVLSGSGTVTNVTLRQPASPGAVVTLHGRFEILSLSGSFLPPPAPPAASGLAIYLAGGQGQVVGGSVVGPLVASGPVVIMAASFGNAAYERLPLEEEETPVAVAGNGGLGSPGIPGTQQQPQQQQQQQLVGDPNSSSLFHGMPQNLLNSVQLPAEGYWGGSARPPF

SEQ ID NO: 261 - DNA, 987 bp, Oryza sativa
  G3407
tcatcatcatcatcacttgcatatcgaattattaataatatcgaagatggcaggccttgatttgggcaccagctacctccaccaccaccaatcactgcatctccgccacgacgatggcggcgccggctccgacgacggcggccacgacgacctctcgccggggagcggcggtggcggcgggcccagcagcacggccggtggcgccgggatcggcggcggcgaggtcgtcgctcgccgcccccgcggccgcccgccgggctccaagaacaagcccaagccgccggtgatcatcaccagggagagcgccaacgcgctcagggcgcatatcctcgaggtagccgccggttgcgatgtgttcgaggcgctgacggcgtacgcgcgccgccggcagcgcggggtgtgcgtgctctcggcggcggggacagtggcgaacgtcacgctccggcagccgcagtcggcgcagcccgggccggcctcgccggcggtggcgacgctgcacggcaggttcgagatactctccctcgcgggctccttcctgcccccgcccgcgccgccgggcgccaccagcctcgccgcgttcctcgccggcgggcaggggcaggtcgtcggtggcagcgtcgccggcgcgctcatcgcggcggggcccgtcgtcgtcgtcgccgcgtcgttcagcaacgtggcgtacgagaggctgccgctcgaggacggcgacgaggtggtccccccggcgccggcagggagcgaccagggcggcggcggcagcggcggcatgccaccattaggcgttgatccgtcgggcggcgccgccaccggtgggctcccgttcttcaacatgccgttcgggatgccgccaatgccggtggacggccacgccggctggcctggcgccggcgtcgggaggccaccgttctcatgatggatggatccccatattccggcgagcggccggcggcgaggtggtcggcaagattgaagacatggacatgg

SEQ ID NO: 262 - protein, 289 aa, Oryza sativa
  G3407 Polypeptide (domain in AA coordinates: 63-71, 143-187, DUF296:90-213)
MAGLDLGTSYLHHHQSLHLRHDDGGAGSDDGGHDDLSPGSGGGGGPSSTAGGAGIGGGEVVARRPRGRPPGSKNKPKPPVIITRESANALRAHILEVAAGCDVFEALTAYARRRQRGVCVLSAAGTVANVTLRQPQSAQPGPASPAVATLHGRFEILSLAGSFLPPPAPPGATSLAAFLAGGQGQVVGGSVAGALIAAGPVVVVAASFSNVAYERLPLEDGDEVVPPAPAGSDQGGGGSGGMPPLGVDPSGGAATGGLPFFNMPFGMPPMPVDGHAGWPGAGVGRPPFS

SEQ ID NO: 263 - DNA, 1361 bp, Arabidopsis thaliana
  G2156
ttttttttccctttcctcgttcaaaaaaagtacttgcagagtcactcactctcagtctcagcacatgaattaatttgaagcttccctagaattctttcacatcaattaatacgacaccgtctcgggtgaagaatctctcctctcttgccctaaagcgagttagggtttaacacacaaagcataccctttagatttgtgtctcttagctctgtttttgtcggcttgtgtaaccgatcaactcaagctattggctcctcacctcctgaaatttgacttctccaatggatctcaaagtttctcttatatgaattctatcttcaccctcacaatatctttatatatatgagccacaagaacaagaagagtcagtagatgcggctgccatggacggtggttacgatcaatccggaggagcttctagatactttcacaacctcttcaggcctgagcttcatcaccagcttcaacctcagcctcaacttcaccctttgcctcagcctcagcctcaacctcagcctcagcagcagaattcagatgatgaatctgactccaacaaggatccgggttccgacccagttacctctggttcaaccgggaaacgtccacgtggacgtcctccgggatccaagaacaagccgaagccaccggtgatagtgactagagatagccccaacgtgcttagatctcatgttcttgaagtctcatctggagccgacatagtcgagagcgttaccacttacgctcgcaggagaggaagaggagtctccattctcagtggtaacggcacggtggctaacgtcagtctccggcagccggcaacgacagcggctcatggggcaaatggtggaaccggaggtgttgtggctctacatggaaggtttgagatactttccctcacaggtacggtgttgccgccccctgcgccgccaggatccggtggtctttctatctttctttccggcgttcaaggtcaggtgattggaggaaacgtggtggctccgcttgtggcttcgggtccagtgatactaatggctgcatcgttctctaatgcaactttcgaaaggcttccccttgaagatgaaggaggagaaggtggagagggaggagaagttggagagggaggaggaggagaaggtggtccaccgccggccacgtcatcatcaccaccatctggagccggtcaaggacagttaagaggtaacatgagtggttatgatcagtttgccggtgatcctcatttgcttggttggggagccgcagccgcagccgcaccaccaagaccagccttttagaattgaaaattatgtccgtaacatagctgtaaccaaatttcatttctcaaaattaaaagaaaaaaaaaa

SEQ ID NO: 264 - protein, 302 aa, Arabidopsis thaliana
  G2156 Polypeptide (domain in AA coordinates: 72-80, 155-199, DUF296:99-225)
MDGGYDQSGGASRYFHNLFRPELHHQLQPQPQLHPLPQPQPQPQPQQQNSDDESDSNKDPGSDPVTSGSTGKRPRGRPPGSKNKPKPPVIVTRDSPNVLRSHVLEVSSGADIVESVTTYARRRGRGVSILSGNGTVANVSLRQPATTAAHGANGGTGGVVALHGRFEILSLTGTVLPPPAPPGSGGLSIFLSGVQGQVIGGNVVAPLVASGPVILMAASFSNATFERLPLEDEGGEGGEGGEVGEGGGGEGGPPPATSSSPPSGAGQGQLRGNMSGYDQFAGDPHLLGWGAAAAAAPPRPAF

SEQ ID NO: 265 - DNA, 1611 bp, Glycine max
  G3462
ccacgcgtccgcactctaaggtacttccccactgttcccattttatgcccgtactagtctgacccttttagtggcatagattgaggtacaattacaaaagcatattacccgtatcgtatcctttctgctacaaccaccccgaaacacactgcgttttttttgtgtcaaacttcaaccggggctttcttacttctcttctcttcaactttttagtgttttttttttttttttctcgtgtcgggtccttgagcttctatttgtttatttatttccggcagcgagttgagttaattttcgtgtcatagtctcaattaggtggatgtgacttgtgtggttagggtttacatgcaaaaacgcatgtgcttcgggtctaattcatcctgaaacaaggttttgggacagagatctgaatatttcaagctatctattttgtttctctatctagaaggttttgagaaatcaaagatggcgaatagatggtgggctgggaatgtgggaatgataagagagcaagagttgatggaaaacagcaacaacaacaacaacaacaacaacgctactactactacaccgacgacgaggagcaacagcaacactaacgcgaacaccaacaccaacacgaccgaggaagaggtgagcagggataacggagaggaccagaaccaaaacctcggcagccacgaagggtcggagcccggaagcagcggtcggaggccacgtggcaggccagcggggtccaagaacaagcccaagccgcccatagtcataatttttttaagccccaacgcgctccgaagccacgtcctggaaatcgcctccggccgcgatgtcgccgagagcatcgccgccttcgccaaccgccgccaccgtggcgtgtcggtcctcagcgggagtggcattgtagccaacgtcactctccgccagcccgccgcccccgccggcgtcataaccctccacgggaggttcgagatactctccctctcgggtgcctttttgccgtccccctcgccgtccggcgccaccggactgaccgtctacctagccggcgggcaggggcaggttgtcggcggcaacgtggcgggctctctcgtcgcctccggaccggtgatggtgatcgccgccactttcgctaatgccacttatgagaggttgcctctggaggatgatcaaggtgaggaggaaatgcaagtgcagcagcagcagcagcagcagcaacagcagcagcagcagcagcagcaacaacaatctcaaggtttgggggaacaggtttcaatgcctatgtataatttgcctcctaatttgctacacaatggtcagaacatgcctcatgatgtgttctggggagctccacctcgccctcctccttccttctgatcacccttgccaatatgatcatgtctttaatctctcactgacttgcgaattaagtactatgttaattaatttctcacggtttttcttgcaagcatagctagctagctagcaaggttagttattaggatggttttgttaatttgtgcttcttagagactcgagtcaagtagatgatgttcttatctttaatatactttgtagtactactggtttgtttattgttttttttaaaaaaaa

SEQ ID NO: 266 - protein, 302 aa, Glycine max
  G3462 Polypeptide (domain in AA coordinates: 82-90, 156-200, DUF296:109-226)
MANRWWAGNVGMIREQELMENSNNNNNNNNATTTTPTTRSNSNTNANTNTNTTEEEVSRDNGEDQNQNLGSHEGSEPGSSGRRPRGRPAGSKNKPKPPIVIIFLSPNALRSHVLEIASGRDVAESIAAFANRRHRGVSVLSGSGIVANVTLRQPAAPAGVITLHGRFEILSLSGAFLPSPSPSGATGLTVYLAGGQGQVVGGNVAGSLVASGPVMVIAATFANATYERLPLEDDQGEEEMQVQQQQQQQQQQQQQQQQQQSQGLGEQVSMPMYNLPPNLLHNGQNMPHDVFWGAPPRPPPSF

SEQ ID NO: 267 - DNA, 862 bp, Glycine max
  G3460
tatggctggtttggatttaggaagcgcgtcacgctttgttcagaatcttcacttaccggacttgcacttgcaacaaaattaccagcaaccccggcacaagcgcgattcggaggagcaagagactcctccgaacccgggaacagcgctggcgccgttcgacaacgatgatgacaaaagccagggcctggagctggcttcaggccctggggacatcgttggacggcgcccacgcggcagaccttccgggtccaagaacaagccgaagccaccggtgataatcacccgggagagcgccaacacgctgagggcgcacattctcgaggtaggaagcggctccgacgtcttcgactgtgtcaccgcttatgcgcggcggcgccagcgcgggatctgcgtcctcagcggcagtggtaccgtcaccaatgtcagtctccggcagcctgcggctgccggagccgtcgtcaggctgcacggaaggttcgagattctctctctctccggctcgttcctcccgccgccggctccgccgggagccaccagtctcacaatctacctcgccggcgggcagggccaggtcgtcggaggaaacgtcgtgggagaattaaccgcggcagggccagtaatcgtcatcgcagcatcgttcaccaacgtggcttacgagaggctccccttagaagaagatgaacaacaacaacaacagcttcagattcagtcacccgcaacgacgtcatctcaaggaaacaacaacaataaccctttccctgacccttcttcaggacttcccttcttcaacttaccactcaatatgcagaatgttcagttaccacctttttgagggttcatgaatctgataatatgagactga

SEQ ID NO: 268 - protein, 276 aa, Glycine max
  G3460 Polypeptide (domain in AA coordinates: 74-82, 148-192, DUF296:101-218)
MAGLDLGSASRFVQNLHLPDLHLQQNYQQPRHKRDSEEQETPPNPGTALAPFDNDDDKSQGLELASGPGDIVGRRPRGRPSGSKNKPKPPVIITRESANTLRAHILEVGSGSDVFDCVTAYARRRQRGICVLSGSGTVTNVSLRQPAAAGAVVRLHGRFEILSLSGSFLPPPAPPGATSLTIYLAGGQGQVVGGNVVGELTAAGPVIVIAASFTNVAYERLPLEEDEQQQQQLQIQSPATTSSQGNNNNNPFPDPSSGLPFFNLPLNMQNVQLPPF

SEQ ID NO: 269 - DNA, 1496 bp, Arabidopsis thaliana
  G2157
tcttttgattttaaccttttttcagtagcaagccaaaaaaaaaaaacagacaaagaagttccttttatgataaaggtatgatgatagcaaacaaatgatacccccatgtcttgtgtgtctgcttcatgcaacatgttggtttggatttggttaatctaaaagtttaagataaggttttcggattctcttcctgtcttgtaatagtttcttgtcggagagccatcaacaccaacttcaacaaaaaaaacaagaaaaagaaaaagattctctttctcgttttatttccattagagaagaaaaaaagaatggcgaatccttggtgggtagggaatgttgcgatcggtggagttgagagtccagtgacgtcatcagctccttctttgcaccacagaaacagtaacaacaacaacccaccgactatgactcgttcggatccaagattggaccatgacttcaccaccaacaacagtggaagccctaatacccagactcagagccaagaagaacagaacagcagagacgagcaaccagctgttgaacccggatccggatccgggtctacgggtcgtcgtcctagaggtagacctcctggttccaagaacaaaccaaagagtccagttgttgttaccaaagaaagccctaactctctccagagccatgttcttgagattgctacgggagctgacgtggcggaaagcttaaacgcctttgctcgtagacgcggccggggcgtttcggtgctgagcggtagtggtttggttactaatgttactctgcgtcagcctgctgcatccggtggagttgttagtttacgtggtcagtttgagatcttgtctatgtgtggggcttttcttcctacgtctggctctcctgctgcagccgctggtttaaccatttacttagctggagctcaaggtcaagttgtgggaggtggagttgctggcccgcttattgcctctggacccgttattgtgatagctgctacgttttgcaatgccacttatgagaggttaccgattgaggaagaacaacagcaagagcagccgcttcaactagaagatgggaagaagcagaaagaagagaatgatgataacgagagtgggaataacggaaacgaaggatcgatgcagccgccgatgtataatatgcctcctaattttatcccaaatggtcatcaaatggctcaacacgacgtgtattggggtggtcctccgcctcgtgctcctccttcgtattgattagttagataggcggtggttggtgcgttctttttactggaatgattatattttccattaggatggttaggcttttgtttattaaagctatcaagtttcttttttttttacggataattcggatgacaattagctagtgtttgtttgtttgttttgtggcggcttttctgacttgactattttgatcgcggatagctttgtatgaaagtgaattgattgtagaatcgtcttttgaattttgatgttggaaaaaaccaa

SEQ ID NO: 270 - protein, 310 aa, Arabidopsis thaliana
  G2157 Polypeptide (domain in AA coordinates: 88-96, 163-207, DUF296:115-233)
MANPWWVGNVAIGGVESPVTSSAPSLHHRNSNNNNPPTMTRSDPRLDHDFTTNNSGSPNTQTQSQEEQNSRDEQPAVEPGSGSGSTGRRPRGRPPGSKNKPKSPVVVTKESPNSLQSHVLEIATGADVAESLNAFARRRGRGVSVLSGSGLVTNVTLRQPAASGGVVSLRGQFEILSMCGAFLPTSGSPAAAAGLTIYLAGAQGQVVGGGVAGPLIASGPVIVIAATFCNATYERLPIEEEQQQEQPLQLEDGKKQKEENDDNESGNNGNEGSMQPPMYNMPPNFIPNGHQMAQHDVYWGGPPPRAPPSY

SEQ ID NO: 271 - DNA, 1611 bp, Oryza sativa; identical to SEQ ID NO: 265
  G3556

SEQ ID NO: 272 - protein, 258 aa, Oryza sativa
  G3556 Polypeptide (domains in AA coordinates: 45-53, 120-164, DUF296:72-190)
MGSIDGHSLQQHQGYSHGGGAGGSNEEEEASPPPGGGSATGSAGRRPRGRPPGSKNKPKPPVVVTRESPNAMRSHVLEIASGADIVEAIAGFSRRRQRGVSVLSGSGAVTNVTLRQPAGTGAAAVALRGRFEILSMSGAFLPAPAPPGATGLAVYLAGGQGQVVGGSVMGELIASGPVMVIAATFGNATYERLPLDQEGEEGAVLSGSEGAAAQMEQQSSGGAVVPPPMYAAVQQTPPHDMFGQWGHAAVARPPPTSF

SEQ ID NO: 273 - DNA, 1596 bp, Glycine max
  G3459
ctgtcgcgtgggaaacaaatggctgcattgtgagttctttgtccccttcaacctcatttcaattctctctctcccccattcttacttcacccgcgccccctcccccgcccgctcccgtcccttttctttctctgcactccatctttctttccaaaacccacccttttctattcctcttcctcttcctccttttcccttctttttatttccttacactcacaacatttcccttaaaataaacataaacaaaccagcactgttcttgacccccaaaaaaaaaaaatctctactatttattaactatattaattcctccataatataatcatttgttttccttgttttctgttttctcttataatatataaccttcttttatctattttttctgttttgcaccttgtgattgtgagttatatctatttatatttatatatcattctctctcttttttttggatgtgtctatggctggtttggatttaggaagcgcctcacgctttgttcaaaaccttcacagaccagacttgcacttgcaacaaaatttccagcagcaccaggaccagcagcaccagcgtgatttggaggagcagaaaactcctccgaatcacagaatgggggcgccgttcgacgatgatagcgatgatagaagcccgggcctggagctcacttcaggtcctggcgacatcgtcggacggcgcccgcgtggcaggcctcctgggtcgaagaacaagcctaagccgcccgtcataatcacccgggagagcgccaacacgctgagggcgcacatcctcgaggtcggaagcggctccgacgtcttcgactgtgtcaccgcgtatgcccggcggcgccagcgtgggatctgcgtcctcagtggcagcggcaccgtcaccaatgtcagtctccggcagcctgcagctgccggtgccgtcgtcacgctgcacggcaggttcgagattctctccctctctggctcgttcctcccgccgccggctccgccgggagccaccagcctcacaatctacctggccggcgggcaggggcaggttgtcggaggaaacgtcatcggagaattaaccgcagcagggccagtaatcgtcatcgcagcgtcgttcaccaacgtggcttacgagaggttacccttagaagaagatgaacaacagcagcaacaacagcagcttcagattcagccacctgcaacgacgtcgtctcaaggaaacaacaacaacaataaccctttccccgacccttcttcaggacttcccttcttcaatttaccactcaatatgcagaatgttcagttaccagttgagggttgggctgtaaaccctgcttcacgtccacaacctttttgagagttcatgaagatgttgacggaggatttatatcacaaaaggctttatattattttaaggtcagcaaattaatattcatggactacaacatatatataaactatatgttttttcttcttcttcatgttattttgtttttttcttatgttgttaatggatataatatgacatgataattattatgtagtctgattttcatctccttggaattttatatacttatttcccctgttaaaaaaaaa

SEQ ID NO: 274 - protein, 295 aa, Glycine max
  G3459 Polypeptide (domain in AA coordinates: 77-85, 151-195, DUF296:104-221)
MAGLDLGSASRFVQNLHRPDLHLQQNFQQHQDQQHQRDLEEQKTPPNHRMGAPFDDDSDDRSPGLELTSGPGDIVGRRPRGRPPGSKNKPKPPVIITRESANTLRAHILEVGSGSDVFDCVTAYARRRQRGICVLSGSGTVTNVSLRQPAAAGAVVTLHGRFEILSLSGSFLPPPAPPGATSLTIYLAGGQGQVVGGNVIGELTAAGPVIVIAASFTNVAYERLPLEEDEQQQQQQQLQIQPPATTSSQGNNNNNNPFPDPSSGLPFFNLPLNMQNVQLPVEGWAVNPASRPQPF

SEQ ID NO: 275 - DNA, 1327 bp, Arabidopsis thaliana
  G1073
tcaccgacccagctctttcacatatgtagacctctctctctctaattattcagtaaggttttgttctctcttgtcgtcttcttgttttgtccgtagcattattaataatcaaactcagtctctgaaatactctcagtgacaaaccacttctgtcgacttttgtctttgtctctcactagctataaccaaaaaaatccaaaaacccaaaccacagtttcttgtttttgttatcaatgtctagttatatgcaccctcttctagggcaagaactgcatctacagagacctgaagattccagaaccccacctgatcaaaataacatggaacttaacagatctgaagcagacgaagcaaaggccgagaccactcccaccggtggagccaccagctcagccacagcctctggctcttcctccggacgtcgtccacgtggtcgtcctgcaggttccaaaaacaaacccaaacctccgacgattataactagagatagtcctaacgtccttagatcacacgttcttgaagtcacctccggttcggacatatccgaggcagtctccacctacgccactcgtcgcggctgcggcgtttgcattataagcggcacgggtgcggtcactaacgtcacgatacggcaacctgcggctccggctggtggaggtgtgattaccctgcatggtcggtttgacattttgtctttgaccggtactgcgcttccaccgcctgcaccaccgggagcaggaggtttgacggtgtatctagccggaggtcaaggacaagttgtaggagggaatgtggctggttcgttaattgcttcgggaccggtagtgttgatggctgcttcttttgcaaacgcagtttatgataggttaccgattgaagaggaagaaaccccaccgccgagaaccaccggggtgcagcagcagcagccggaggcgtctcagtcgtcggaggttacggggagtggggcccaggcgtgtgagtcaaacctccaaggtggaaatggtggaggaggtgttgctttctacaatcttggaatgaatatgaacaattttcaattctccgggggagatatttacggtatgagcggcggtagcggaggaggtggtggcggtgcgactagacccgcgttttagagttttagcgttttggtgacaccttttgttgcgtttgcgtgtttgacctcaaactactaggctactagctatagcggttgcgaaatgcgaatattaggttttatttatttattttttgtttctcttaaaacttggtgtgtgaaaaaagaaaacgaacgcttaaatttcctttttctgtttgtttttatgaggcc

SEQ ID NO: 276 - protein, 299 aa, Arabidopsis thaliana
  G1073 Polypeptide (domain in AA coordinates: 63-71, 107-204, DUF296:90-209)
MSSYMHPLLGQELHLQRPEDSRTPPDQNNMELNRSEADEAKAETTPTGGATSSATASGSSSGRRPRGRPAGSKNKPKPPTIITRDSPNVLRSHVLEVTSGSDISEAVSTYATRRGCGVCIISGTGAVTNVTIRQPAAPAGGGVITLHGRFDILSLTGTALPPPAPPGAGGLTVYLAGGQGQVVGGNVAGSLIASGPVVLMAASFANAVYDRLPIEEEETPPPRTTGVQQQQPEASQSSEVTGSGAQACESNLQGGNGGGGVAFYNLGMNMNNFQFSGGDIYGMSGGSGGGGGGATRPAF

SEQ ID NO: 277 - DNA, 1143 bp, Oryza sativa
  G3400
ctctgcaggtgaggtgaggtgaggggtgggatcgagggatcgagaagctggcggcgagcaagtggtgggagcgcgccgatgagggcgccatggccgggatggatcccaccggcggcggtggcggcggcggcgtggcggcgcactacctacacatgctccgcgcgcagcagcaccagccactgtccccggcaggtgacgtcaaggcggagcggtccatgctgtcgccggatgagagccccggcgcggacgccgacctaggatcggaccacccgacgtcgtcggccatggtggcggcggaggacagcggcggcggcagcggttcgggtggcccgatgcggcgcccccgcgggaggccgctgggctccaagaacaagcccaagccgcccatcatcgtgacgcgggacagccccaacgcgttccactcccacgtcctcgaggtcgccgcgggaaccgacatcgtcgagtgcgtctgcgagttcgcgcgccgccgcggccgcggcgtctccgtgctcagcggtggcggcgccgtcgccaacgtcgcgctccgccagccaggcgcgtcgcccccgggcagcctggtcgccaccatgcgcggccagttcgagatcctgtccctcacgggcaccgtcctcccgccgcccgcgccgcccagcgccagcggcctcaccgtcttcctctccggcgggcagggccaggtggtcggcgggagcgtggccggccagctcatcgccgcggggccagtcttcctcatggccgcctcgttcgccaatgccgtctacgagcgtctgccactcgatggggaggatccggaggcagaggctgccgccgccacccctcccggcgatgcggcgcagccaaccggcccaccaccaccgcagcagcagcccacagcctcgcagtcctctgaggtgaccgccggtgacggcggcggcggcggcggtctcggcatgtatcttggaggccatgtgggatcctaccagcagcagcagcagcaacttcccggaccaggagacaacttcggtagctggagcggcagcatcaggccgccgccattctgatccaaacacctcaaatcaagctctcccccaacaacgccatgcatgtctaaatcctcacaagattcactccaagaagacgaagctg

SEQ ID NO: 278 - protein, 322 aa, Oryza sativa
  G3400 Polypeptide (domain in AA coordinates: 83-91, 160-204, DUF296:110-230)
MAGMDPTGGGGGGGVAAHYLHMLRAQQHQPLSPAGDVKAERSMLSPDESPGADADLGSDHPTSSAMVAAEDSGGGSGSGGPMRRPRGRPLGSKNKPKPPIIVTRDSPNAFHSHVLEVAAGTDIVECVCEFARRRGRGVSVLSGGGAVANVALRQPGASPPGSLVATMRGQFEILSLTGTVLPPPAPPSASGLTVFLSGGQGQVVGGSVAGQLIAAGPVFLMAASFANAVYERLPLDGEDPEAEAAAATPPGDAAQPTGPPPPQQQPTASQSSEVTAGDGGGGGGLGMYLGGHVGSYQQQQQQLPGPGDNFGSWSGSIRPPPF

SEQ ID NO: 279 - DNA, 938 bp, Arabidopsis thaliana
  G1667
tcgacccatccctactcctcacaatcattcttttggtgtctctaccatttaataattcaccaaaatctccttacttaaactcacaaactcctcacaaattttctgaatctttcagttgaacatataacaacattcataacaatggctggaggtacagctctaactccaacctctgtaggatccaagtctgttccaatgaggaaccatgaagcaacagagagaggcaacaccaacaacaacctgagagcattacccaaagccgtccaaccggtttcatcaatcgaaggagagatggctaagaggccacgtggcagacccgctggctccaagaacaaacccaaaccaccaatcattgtgactcacgacagtccaaattccctcagagctaacgccgttgagatcagctcaggttgtgacatctgtgagactttatcggattttgcaagaaggaaacagagaggtctctgcattctcagtgccaatggttgtgtcaccaatgtgacattaaggcaaccagcttcatcaggagcaattgtcacattacacggacgttacgagatcctctcattgcttggatcaatcttgcctccaccagcaccacttggaataactggtctgaccatttacttagccggacctcaaggacaggttgttggtggaggagtggttggtgggctaatcgcatctggtcctgttgttctcatggctgcatctttcatgaatgctgtttttgatcgtcttcctatggatgatgatgaagctgcctctatgcagaaccagcagtactaccagaatggaagatcccgtcctttagatgacattcatggactgcctcaaaatctgctcactaatggaaactcggcttctgatatctactcttgggggccttggaatcaaagataaatgtgtctgtaggttgagagagaaccgtaagtctg

SEQ ID NO: 280 - protein, 253 aa, Arabidopsis thaliana
  G1667 Polypeptide (domain in AA coordinates: 53-61, 127-171, DUF296:80-197)
MAGGTALTPTSVGSKSVPMRNHEATERGNTNNNLRALPKAVQPVSSIEGEMAKRPRGRPAGSKNKPKPPIIVTHDSPNSLRANAVEISSGCDICETLSDFARRKQRGLCILSANGCVTNVTLRQPASSGAIVTLHGRYEILSLLGSILPPPAPLGITGLTIYLAGPQGQVVGGGVVGGLIASGPVVLMAASFMNAVFDRLPMDDDEAASMQNQQYYQNGRSRPLDDIHGLPQNLLTNGNSASDIYSWGPWNQR

SEQ ID NO: 281 - protein, 34 aa, Arabidopsis thaliana
  misc_feature (2)..(4): Xaa can be any naturally occurring amino acid
  misc_feature (8)..(9): Xaa can be any naturally occurring amino acid
  misc_feature (11)..(12): Xaa can be any naturally occurring amino acid
  misc_feature (15)..(16): Xaa can be any naturally occurring amino acid
  misc_feature (17)..(17): Xaa is 1 to 2 residues in length and which can be any naturally occurring amino acid
  misc_feature (19)..(23): Xaa can be any naturally occurring amino acid
  misc_feature (25)..(27): Xaa can be any naturally occurring amino acid
  misc_feature (29)..(29): Xaa can be any naturally occurring amino acid
  misc_feature (31)..(31): Xaa can be any naturally occurring amino acid
  G1073 2nd domain clade consensus sequence)
GXXXILSXXGXXLPXXXPXXXXXLXXXLXGXQGQ

We claim:

1. A transgenic plant comprising a recombinant polynucleotide encoding a polypeptide having a percentage identity with any of SEQ ID NOs: 2n, where n=1 to 140, or to a conserved domain of SEQ ID NOs: 2n, where n=1 to 140;
(a) wherein the percentage identity is selected from the group consisting of at least 50%, at least 51%, at least 52%, at least 53%, at least 54%, at least 55%, at least 56%, at least 57%, at least 58%, at least 59%, at least 60%, at least 61%, at least 62%, at least 63%, at least 64%, at least 65%, at least 66%, at least 67%, at least 68%, at least 69%, at least 70%, at least 71%, at least 72%, at least 73%, at least 74%, at least 75%, at least 76%, at least 77%, at least 78%, at least 79%, at least 80%, at least 81%, at least 82%, at least 83%, at least 84%, at least 85%, at least 86%, at least 87%, at least 88%, at least 89%, at least 90%, at least 91%, at least 92%, at least 93%, at least 94%, at least 95%, at least 96%, at least 97%, at least 98%, at least 99%, and about 100%;
wherein the conserved domain is required for a function by the polypeptide of regulating transcription, and the polypeptide confers to the transgenic plant an altered trait as compared to a control plant.

2. The transgenic plant of claim 1, wherein the transgenic plant comprises a recombinant polynucleotide encoding an At-hook transcription factor polypeptide having a percentage identity with SEQ ID NO: 4, or to a conserved domain of amino acids 162-206 of SEQ ID NO: 84;
(a) wherein the percentage identity is selected from the group consisting of at least 50%, at least 51%, at least 52%, at least 53%, at least 54%, at least 55%, at least 56%, at least 57%, at least 58%, at least 59%, at least 60%, at least 61%, at least 62%, at least 63%, at least 64%, at least 65%, at least 66%, at least 67%, at least 68%, at least 69%, at least 70%, at least 71%, at least 72%, at least 73%, at least 74%, at least 75%, at least 76%, at least 77%, at least 78%, at least 79%, at least 80%, at least 81%, at least 82%, at least 83%, at least 84%, at least 85%, at least 86%, at least 87%, at least 88%, at least 89%, at least 90%, at least 91%, at least 92%, at least 93%, at least 94%, at least 95%, at least 96%, at least 97%, at least 98%, at least 99%, and about 100%;
wherein the conserved domain is required for a function by the polypeptide of regulating transcription, and the polypeptide confers to the transgenic plant the altered trait; and
the altered trait is selected from the group consisting of more delayed flowering, enlarged lateral organs, greater biomass, greater tolerance to hyperosmotic tolerance, greater tolerance to sucrose, greater tolerance to water deficit, greater tolerance to drought, greater tolerance to salt, decreased sensitivity to abscisic acid, and greater tolerance to cold.

3. The transgenic plant of claim 2, wherein the transgenic plant is more tolerant to 150 mM NaCl than the control plant.

4. The transgenic plant of claim 2, wherein the transgenic plant is more tolerant to 9.4% sucrose than the control plant.

5. The transgenic plant of claim 2, wherein the transgenic plant is more tolerant to 8° C. than the control plant.

6. The transgenic plant of claim 2, wherein expression of the polypeptide is regulated by a constitutive, inducible, or tissue-specific promoter.

7. A host cell produced from the transgenic plant of claim 2, wherein the host cell comprises the recombinant polynucleotide.

8. A transgenic seed produced from the transgenic plant of claim 2, wherein the transgenic seed comprises the recombinant polynucleotide.

9. The transgenic plant of claim 2, wherein the plant is selected from the group consisting of: canola, soybean, wheat, corn, potato, cotton, rice, oilseed rape, sunflower, alfalfa, sugarcane, turf, banana, blackberry, blueberry, strawberry, raspberry, cantaloupe, carrot, cauliflower, coffee, cucumber, eggplant, grapes, honeydew, lettuce, mango, melon, onion, papaya, peas, peppers, pineapple, pumpkin, spinach, squash, sweet corn, tobacco, tomato, watermelon, mint and other labiates, rosaceous fruits, and vegetable brassicas.

10. A method of altering a trait in a plant, the method steps comprising:
introducing into a target plant a recombinant polynucleotide encoding an At-hook transcription factor polypeptide having a percentage identity with SEQ ID NO: 4, or to a conserved domain of amino acids 162-206 of SEQ ID NO: 84;
(a) wherein the percentage identity is selected from the group consisting of at least 50%, at least 51%, at least 52%, at least 53%, at least 54%, at least 55%, at least 56%, at least 57%, at least 58%, at least 59%, at least 60%, at least 61%, at least 62%, at least 63%, at least 64%, at least 65%, at least 66%, at least 67%, at least 68%, at least 69%, at least 70%, at least 71%, at least 72%, at least 73%, at least 74%, at least 75%, at least 76%, at least 77%, at least 78%, at least 79%, at least 80%, at least 81%, at least 82%, at least 83%, at least 84%, at least 85%, at least 86%, at least 87%, at least 88%, at least 89%, at least 90%, at least 91%, at least 92%, at least 93%, at least 94%, at least 95%, at least 96%, at least 97%, at least 98%, at least 99%, and about 100%;
wherein the conserved domain is required for a function by the polypeptide of regulating transcription, and the polypeptide confers to the transgenic plant the altered trait; and
the altered trait is selected from the group consisting of more delayed flowering, enlarged lateral organs, greater biomass, greater tolerance to hyperosmotic tolerance, greater tolerance to sucrose, greater tolerance to water deficit, greater tolerance to drought, greater tolerance to salt, decreased sensitivity to abscisic acid, and greater tolerance to cold.

11. The method of claim 8, wherein the transgenic plant produces transgenic seed, and a progeny plant grown from the transgenic seed comprises the recombinant polynucleotide and has the altered trait relative to the control plant.

12. The method of claim 8, wherein the transgenic plant is crossed with another plant, transgenic seed is selected, and a progeny plant grown from the transgenic seed comprises the recombinant polynucleotide and has the altered trait relative to the control plant.

13. A method of imparting an altered trait to a crop plant by crossing a first transgenic crop plant with a second crop plant, wherein said first transgenic crop plant contains recombinant DNA which expresses a transcription factor having at least 50% identity to SEQ ID NO: 84 or to a conserved domain of amino acids 162-206 of SEQ ID NO: 84, wherein said method further comprises a screening process for identification of the altered trait;
wherein the altered trait is selected from the group consisting of more delayed flowering, enlarged lateral organs, greater biomass, greater tolerance to hyperosmotic tolerance, greater tolerance to sucrose, greater tolerance to water deficit, greater tolerance to drought, greater tolerance to salt, decreased sensitivity to abscisic acid, and greater tolerance to cold.

14. The method of claim 13, wherein said transcription factor has at least 80% identity to SEQ ID NO: 84 or to a conserved domain of amino acids 162-206 of SEQ ID NO: 84.

15. The method of claim 13, wherein said transcription factor has at least 85% identity to SEQ ID NO: 84 or to a conserved domain of amino acids 162-206 of SEQ ID NO: 84.

16. The method of claim 13, wherein said transcription factor has at least 90% identity to SEQ ID NO: 84 or to a conserved domain of amino acids 162-206 of SEQ ID NO: 84.

17. The method of claim 13, wherein said transcription factor has at least 95% identity to SEQ ID NO: 84 or to a conserved domain of amino acids 162-206 of SEQ ID NO: 84.

18. The method of claim 13, wherein said transcription factor has 100% identity to SEQ ID NO: 84 or to a conserved domain of amino acids 162-206 of SEQ ID NO: 84.
